United States Patent Application Publication US 2026/0193649 A1 - sequence listing, part 2

SEQ ID NO: 26 - DNA, 800558 bp, Homo sapiens
  source 1..800558: mol_type = genomic DNA; note = USH2A_gene
agttccaagagggccaccaagcagaccacgctctgagcttcaggtaaccaagtgtttgctctgcagaatactttacctgggcacccaagtcttccttccagcattcctgctgctacagcctatttgctgagtaaccaggggttacagcagcgttgccaggcaacgagggacagcggtcctgttgaagagccatttgtcacactgaggggactggttgaaatgcaataaagaaatggtaactcagcttatttatcaatacaattacttgcacagtattagggatccatgtgtaacctacaaattcatagtcatatgaggaaacacagaaacattttgctaaatattaaagcataggacagacagatggtgttgggtttctaatcagctttactctgagcttaaagttgctgcacatgctgggataaggggaaaggcccaaagtcctttgccagctttattttgggcatctgtaagttagctctgggttacaatgtacagtgcatgtgtaaagaaaatctacaagattcttttccctgttaagtagagctggtaatgccattgctaattccctggggtgaagtaacaacacaaaattattgtatgtgtaatatattattaataattatatatatataaaacacacacatatattatataaatatttatgtataactggttataaatattactggttgtcctgtggacttataaagtgcttgatttgcccaatgcaatcaagagatttaccaaaaggatgagtattttactctgagcactgtgcttcaaaatgttttttgagaagttcagtagtgttgcttctaggagctcaaagtcctcaggcctgggatgagcttcagttttaaaggtgcagcagctttcccttgacgccctacgtttttgattcccagataccagcagctactcatgtcttcgccattgctaagaacgtcgttggtattaccttactctgagaacgtgtctgcagtttccagaaaatggagtatcgcaacatcacttaaagtaccctgcttcaaagtattgctggcaagtggcgtgggcctgattatttatttagaaatgctttatcaggaggagaatgcttttttgtaaacatgaattgcccagttctttcattgggctctggcttcttgtttcaggtcattgaaatgttgatctttgcctattttgcttcaatatccttgactgagtcacgaggtcttttcccaaggctggagaacgtgggagctttcaagaaagtttccatcgtgccaacccaagcagtatgtggactcccagaccgaagcactttttgtcacagctctgctgctgctgaaagtattcagttctgtacccagcggttttgtattcaggattgcccatacagatcttcacaccctacctacactgcccttttctcagcaggcctcagtagctgcatcacaccagacaagaatgatctgcatcctaacgcccatagcaattctgcaagttttatttttggaaatcacaagagctgcttttcttctcctccttctccaaagctgatggcatcatttaccttagctgtatggctgaaacctgagcaacaaggtgtaatgtaagtagtagtgtaggtataagctttcataggtccccaaaaccagtagtagtgaagatcatttcagcctgaattccaaaccggaagtgaaggctatatagaattcatggtattgaagactaactcttccagttgtttccccaattaaaatttttttctcttctatggatgaaatggaccatgaaaaaaaatgtgaaaatagtttatcaaaggcaaatgtgtttatgcaggaatcatttattttctatagcttagcgcgacctttggtcttagccttcaaagcctaaagaagactcagagtgagttttaaggcatggaaacttgtaattaatacaaataattaatattttcaaaatcttgaactgggtttatataatcaacatttccttactagggtataacattttcattaggcagatagttctcccagtccttgggactgttttcttcatcctcgtttccccaagaagagctgtttgtttgactcatggaagatgttcagtaatataaattgaatatataaataaccctccatctctaaaaacatatagcttttagttctttatcttgtggtattttcattttccaattagttaggaaatatgtaggtaagtgtgagagattctcaaaagctttcatgctgttcatcccagagaaatgccttcaatgagtctgggtcttattactgccattttttgttatttaatcaccagtttttcattctgtaatcttttctcaagctgatatctaatgagtttcttctaaatatttattgccaacctggagattttaatatacaggacagttttgaggaatttttgcttatcttttttcttcctagagggcttttggccctttctcttgtgacattttctgtgtgtgacagcgttggctggatatctaaaaacttgtgaaacaaaccagaaaaggattacaatctcataagcaaataggacttaaatgtttttggtgtttagtttcaatttgccaagtgaaagttggcatgtcttcattttgttttaaatttggattaatcacaaaattaatcacaaaccattcccatttctacatctctcctcaaagaaaaccttgttttcttactgtttgaaattctagtaaattcaagctactcagtttatataattaacatctgaagagtcttaaaacattgtcttttgacaaatagggctaagataaaatatccttctgagcttgtagggacatatctgtaccaaattcatcttctattgacatcattttgtataaataagacagagaagtatttacagggttggaagaacatggttaatggttttgagagttccttgtatcaaggtcgtttccattttcaaaattaaaatacctttgggaattgggggaatttcggggtgtttgcactagataagtaaaacaaacaaaacatggattatccaattattgtttattcaggagcagaataaatccagttcctaaatattttgctacctgccttcctctcacatttattatctaccaaagctagtatgtttacaagcaaacaaaatagcaaggaagataatcaataacatattaagaaatgcattttcagtaagcttgggaaaataagtctgcatttggtaaatacattcttgagtaatggtcgaattctcacttgtagatttaaacagaagaaaaatgaataggggcaaactcttttcaggttaagacctgatgggtagggataaaaacaaattcacttcagtaaattagaaatattcaactactgaagggttaaaaatataatttgcagtagaatttatataaaacttttatttctacttatataaaacctttatgtcatctaaatctatttgcctaaattaaaaatatacttgcactcataactttataccaaatatacatacaaaatatagtaaaattgtgacagtaaatgagggactattagtgttttacaatcttattcttacctcccaactcaggaaaaaaatagatgcaagtgatagatgcaagtgagaagaaattatgtgtgaaaaacatgccctttaaggaaagctttaaaccatctttagcagtaattcttgattggctcaattttatacatttgcctctctgatacttcctaccaaatttgatcacaaactcatcattttttgagagactactgtatcctaggtgtttgtgtgtgtatcctcagaatactcatgatctaaatgatctaatggagtgtacagatggatgagtgttattacctaggcagcacagtgtgttaagtgagcacaaagtgagacccctcaaccgaccctgagcaggaagaagggtgccaggaccaagcataatcattcagataccaaagctaagtaggaggtaaccaggtgaagaagagacctcaaggtctgaaaggtgtgtcactctaataagggtagagataacttaaaataatttgataactgccctgacacaagacctggaagttttctgaaaactcttctagtttttcaaaatcttatttcactgtgttctagaaggctgaaggacctttcacctcagatatttaacatgatctcagtacctcagttggactgtacggtcatggagaggtagccagtcatcttacagacactggctttggctttgtgccagttgatgatggggtgagtagagactatagctgtccattcttcatttcaccatgggaattaaatagagtgattctgacttcagggctaccaatttagagccttccatggacactaaatttgctttacattaaaaaaaaatttttgcactgatgacttaatactcaagcggcctgtagtgtgttgtaccacttcctctaaaagaaatagcaggagaactaatgagccaataacctaaatgttagttttgcagaatgattcaaccactttagtttccatcatgaatctctaatgaagggtgctgaggctctggggaatatattgtaaataagaattctattttttattgaaataaaggggcttcttcattggaataaagctttcattgaatataatgacattcaggcacttattcatagtacaccattttgagcaaagtttgaggtcattttaacaccactgtaactgcacaataccttagcatgtctttttggttggatgctgaccttttctctcttttccggttgcttcctaaggtgtgttatagaaaagacagtagatgggcagattgtgttcaaacttacaatatctgagaaagagaccatgttttattatcgcacagtaaatggtttgcaacctccaataaaagtaatgacactggggagaattcttgtgaagaaatggattcatcttagtgtgcaggtgagtaaaataaaaaatatttaacatttggttaaacacaaggatttgtcttcctttctctcttttaaatggcatctactcacaaaatctgcagcagtatcttttagatttcaggtgtgtataaatgacaactaaagaagaaaaatatttaaatgacctaatgatgtatctcttgatatactagcatttcctcccccaaaattgctgtaaaagctctcacagaaacttaaagacaatgctatctgtaattgtaatatcctcagaaaatttttgttttcttgggttcgtatattctattttgtttaaaaatgtgtaagggctcatttgatgtctggtactaattttactagtcatggatgtattaataccccagcttgatttttacatctgtctttctcagcagctgatgatgtgaataaaatttgtctgttgcattaaaatggtgaccttagaactaatgaactttacacttgaggcactcaaaaggtgttatattattattttagttgtcaaccacagtttgtatgagccttagaagctgctaaaggctgagagagctgtgacatgtctggtatttacagtctccagaagagaggcacagttcatccttttgttttttcagggcactggaatggcccaatacagttaaagccacacctgcctttcaaaccaggtgtattagtccattcttccactactataaaaaataccggagactgggtaatttattataaagaaaagaggttcaattggctcatggttctgtgggctatacaggaagcatgattctggcatctgctcagcttctggggagaccttagaaaacttacaatcacggcagcagacaaaggctgagcaagcacttcatgtggccagaatagggaggaaaagaaagaaagggaggtacttcacacttttaaaccaccagatctcatgagaattctatcaggagactagcactaggtggatggtgttaaagtactgatgagaaaacgtctacatgttccaataacctcccatcaggccccaccaccaaagctggggattacaattggacatgaggtttgggtggggacacagagccaaatcatgtaacttggggtgctgggtaccacagtttccagtatgagctctcatatgagcatccatccagtggctcatgtgaacctcatttgaactagaggacatttacatccttgttcattttataaaaattatctttgatttctcacttttttttttttttttaatcttgaagcagataatgagtgtgcgtcctcagagggtcttgataattgttcattgttttggctttcagatactaagatatgagtttagcaaatgtgattggcaggggtcagagttttcatacacaactagggttgaaatgatacacaaaggggacgtcatgtctgacgtcaagccttgtgcataggacatgatggtttctgattctcaatgcttattctccatgtgttcagtagttaacagataggagaccaatttgtcctagtcttgaagtttccattgtcttgaagtctccattctgcccactgaccagtcctacagaattgggttttaatattaaaaacgtagaaatagaaacttttaaagacagtgccatctttgcagaagatgccaaatagatatgtttgttgcatatttttgtatcaacaatgacaaaaaaattatctttacttgcctttattttgtgttatctgtgaaactgtgccatgttttggcaggcagtagtacattaaaagcttcacaaagaaagtttaaaatctaaatgcagagcggtaaccatgactgaattactcccttggggataaaatgctcttagagtgcctactgaaatcagcattatcatttcaatacatgtcaaatatgagtcatttactagtttaggcaaaatttcttcatgaatctttaaatctttctcttctttcaagaaaaggttaaagtacttatgatttaatgagactgctttatttcataactgtttgactatcaagagaaaacttgtccttttcgatttgtacactcttttatttatttttttgcataagttttaaactattctgcattttatattaaaactacagaactaggcagtcacaaaatgttagaaaaccattcagatctgtcatttaatcatctagcacttattaaatatttgaggggtatgcagcattatgggaatctggatttattcaaatgaaaattaaagagcaattatttactctaaaatggagctctatataaggttcctttatattggacaacagtctgaatatgtttaaggtattatgaaatttataaaaatccatattatagatttttttttgagacagagtttctcccttgttgcccaggctggagtgcaatggcatgatcttggctcactgcaacctccgtctcctgagttcaagagattatcctgcctcagcctcccaagtagctgagattacaggtgcctacaaccacactggctaattttttgtatttttagtagagaaggagtttcaccattgttggccaggctggtctcgaattcctgacctcaggtgatccacctgccttggcctcccaaagtgatggtattacaggcatgagccagagtgcccagcctagattttgaaaaaggaatgtactgattactcaaaagttgttataagaaataatggaggccaggcgcagtggttcatgcctgtaatcccagcattttgggaggtagaagtgaacggatagctcgaaccaggagttcgaggccagcctgggcaacatggcaaaacctcatctctacgaaaaaacaccctaaaaaaattagccaggtgtgatggtgcgtgtctgtagacccagctactcaggaggttggggctaaagtgaaaagatcacctaagcctggaagtcaaggcttcagtgacccatgatcatgccactgcattccagcctgggcgaaagagcaagatcctgtctgaaaaaaaaaaaaaaaaaaaaaaaaagtgacaggaaggacaggagattaggagttgggaaatctgatttaggttatgctactctgtagtcttaagaataaaatttataggaatccatatgatagttgtttaataaggaatgtactaattgcttaaacgttgttataagaagtaatggaagctgggcacagtggctcacacctataccctgcccgccttgacgtctcaaactgagtcatttgactcagttttcctatttacataagaagattgaactagatgaacaaaatgagggccttttgaattcttcataaacaagtaagtggagtgtggagtgtagcacaagtcattaaagtatggcaagctgttgagttgtgtagggttatttaggtagtaagtgacagagccagccccattaaccaatgatcagtcttgtgctttttttctcttctcccatgctgcttggcatttacataaaaacatttttttgctagattttctggacaaaatatagagaaatgtagattgttactattccattgtataactgcaagaacatttccagaaaaaatattttagtataaaatgtaacttactgttgcatgattatataatgcatctaaactccatttaatttggggattagggacttttatcatgctgggcataggacagaacaaatgattaataatcttgtttagtcaagtttcaaactacaaacctgcactttatgtatatgtggattttcacccatcttccaaatggccacaaattgatgaatttatatagtgtgtgtgtttctgtgcatgtgaaaaaataaaacatacaactctattcgtggaatggcccagaaaccagaattttagttcgttgcttatagtgattttttactggttagcttatacctggtggcataaaattaattagcagatctcaacttatgctttatctcagacagttcacttgtatcagctttccatcagtaaaatcagaattctaatttaccaaaatcagaaaaaaaattattttaaataattaaatatctgggggaaaagatgtcaggaaatccagacataccaaaattggaaatcgaatttcctaaacaaacaaatagacaatatgctcaatattgctatggtaatgaatctcacagcttttattccaaaactagcattttaaagtgtcaatctgttggaaaatgattagtgtttaaattaatattcatttatggacttgaatctgacaggattgccaattgaaattttactttggggtttaatatattggctatttcaaattatatcaagctaaaattcattgtgtcattttttatactaaaactagaaaaaatcaattcatagtttttattatcatatagggaacactgatcatattagcaaaatttttaaagcttagttttcatattaaatcagcacatgctgtagttataagatttcctttggttactcttataaaagttttgaaatatgtaaaaaaatttactttagcatttcgttatggattggtaggtaaaacaatatggaaataagtatatgtgtttagtggcatttcatttaaaagtaaaactttagggttttctttgacaatatattttgccttaagcagttccacacattttatagcccaaatagtgtcaaagaatcatcagtatagtcatccttctagtaattatgcagaattgcagtaaaacaattactacgatttgaagctgatgaaatactacagctgtggaaccaagaaatgatttagcattgggcttgttcacattttctatgctattttcagggctccttgatacattgacaattcaagagccatagatgactctagctacaatagtgtgaaaaagagcagttctaatatgatacaatgaagaaaaaaatgcatgggtaaataaagttttaggaatcaatatatgaaggataggagtttcataatcacagttcatgaagtatgctcttttgatttatgtattcaatctaagaaagaaaaactattgatagttctggaggaaaacaaaatgcaatttaaccaacatttgttagaatagataaaccaagtctctcaattaatctctgaactgtatgcccatgtgcacactttataaaggtgtttccatgttcctattgattgagggaacataaaacatccatgtcaccttatggaagcctcctcattcagttcagtaagctttatggcatagaattgtcataggaataccatcccagccccactcccattctaagagaatctcaacccatattatttctttaatatatcattgcatttagctctgactctgtgtgtgtgtgtatgtgtgtgtaagtatgcatgcatatgtgtgctaaatgtttctttgtgcaaagccttctctttatatctagccagctgggttaacagctcaagttagttgaatagttttgggttattcaaaataaattaagatcaatagaatataatgaagtttttcagaacaatcagttacaaattatcatagctgctattaatcattgatttatgtgcactatattaaacatgttacatatttgcagttatacaatgaaatagtgacatgcttgtaacatgtttaatatagtgttaataatagctctgtgccactgacttatattatctccatgacagagattttaaaaaattagccttaggaaatttaaactacctgcctacatttatagtcccaagcttctctgaccttaaactaaaagtaataacttgccatgaacatgggtcactgagcagatctaaataatagtttttaaaattctccaaaccaaaaaaaaaaggcacagaatcccaaaagaactgaaaacatatatttataatgtaaatataattttgtatatttatacatatttgtaatataaatattttcaatgcttcagatatttacatgatttatacaaataattaaagtcaatatattttttaactatacccctcattgatacaagcaatttaaatgtacaacagaatgtaattttgtataaagttctgcgcaatattttcatgttttatggcagttgcgatagactacaatggcttaaagaaagaatatttcccttaagccagcctgatcacctgacccatgccttatagaatcaacccttattacaataaaatacaaagaaggaagcacttcctactttattatggaagaggtaaaaccatccaagtaaaaaagtaattattctctgtacgttttttgcatgtgattttaaaatgcaatatttaagcagaaggcaaggctttaattcttgaccttttagtaaaaaattgtgcaaccctgggaaaactatgtaactcctcaaaatgttaggatacccattacaaattggaaacaaacaaacttggcctatttagcttacaccataaatttgaacatataaagaaaatattgtctactaaaacactttatagcctataacttcctgctatgaaggagcttacagtctcttcagaggataagcaatcaaataattacacaaataaaggcaaaattataattgtggtaagtgctacatgatcacatgaagaatgatttggtcaaaccactgaagtcaagaaaagcttccttgagtaaatgttattgaatatgtgtattagttttctaggcctgtactaaaaaattatcacaaactggtggcttaacacaacagttaattcattgttgaagagttctggaggctagaaagctgaaatcaagttgttagaagggccatgctctttctgaaacctctagaatccttccttgtctcttccagcatctggtgtttgcacagacaccagagtatgtgattgtgctacctcctggggtttgtctgcccacagcaaggccgggaacccagaaaagaaaagaggagtgcccagtgtagccaccacccactgcatgagaaacagagctggcagcaatccttgatgctccttagcttgtagctacatcactccagcctctgtctgcattatcatatggtcctctcctctgatcgtgtgtgtcttctcttcttataaggacatcagttgtactggattaggattcttcctaattcggtaggactcatcttaacaattacatccaaaaagacactacccaaataaggtcagagtcacaggcacatagggttagggcttcagtatgacttttgatgggacacagttcaactgatagtaagatttattcaaaagaatgcataggatccaactgggcaaagagaattgataagaacattccataaatgcatagcaaatagtgtaaatgcccttgtataaaaagaaatatgttacatagactaaaaaaccaaagtggttagagtgtcgctggcaaagtgggacatggtgtgaaatgaggacagaacagtaggaagaggctatgtgttaaagagaatcactggatatgttaagattttttttttaaatggaactctattgaactgttttatgtgaaggacaggagatgagggatgaggataaggaaggaaaacgtatgatatgcacagattattttttcctaaagatcactttggctgcagtgagggagaatggtttgcttgaagacaagtgtgaagggttgttatggtattttcatggaccaagtcagatgtaagtgttacttacttacagcatgaagacaatagtgaatatgcaaatgaatggtcagctttgagaggagtttaagaattaaattaaagggcttgttgatgaaggaatatgtaatatgagggaaagggagttgatgaatcccagctttctggcttatgtaattgcaggtacagtgatttctttttctcaaatagaaatactggaagagaatcagattttggatgtggagcacatatgaattagattccagtttagggtaataattctcaactatagaaattattagcattattgagaaactttaaaaaatattctgatgtccatatccctttatgtcttcattggtctaggtggggcgcaggcattatttctttctttcttccttccctgatggatttaaaaaggtgtaacaaaagaaaatatcagtctaccattgatgagcatttaggttggttccatatctttgctattgtgaacagtgctgcaacgaatatacatgtgcatgcgtctttatgatagaatgactcagattcctttggatatatacgcaggaatggaattgctgggtataatggtagttctgttttttttggtctttgaggaattgtcacactgttttctgtaatggttgaagtaatttacactcccaacatcagcctattaagcattcctttttctctgcaacctcactagcactgttgtttcttgactttttaataacagacattctgactgatgtgagatggtatctttcattgtggttttgattgacattgctctgatgatcagcgatcatatgcttgttggccacatgtatgtcttcttttgaaaagggtctatttatgtcctttgcccactttttaatagggttgtttttttcttgtagatttgttgaagtttgttatagaggccagctatcagacctttgccagatgtatagtttgcaaaacttttctctcactctataggttatctgttcactctgttgatagttcgttttgctgtgcagaagctctttaatttaatttgatcccatttgtcattgcttttggcatctctgtcgtgaaatctttgcctgttcctatttcctatgtccagaatgctattgcctagattgtctttcaggcttttagttttgggttttacgtttaagtctttattccaacttgagttgatttttatatatggtataaggaaggggtccagtttcaatcttctgcatatggctagccagttatcccaacatttattgaatagggagtcctttccccattgcttgtttttgtcagctttctcaaagatcagatggtggtaggtgtgatggccttatttctgggctctctattctttttcttcggtctatgtgtctgtttttgtaccagattcatgctgttttgcttactgtagccctgtagtatagtttgcagtcaagtaatgcaatgcctccacctttgttatttttgtgtaggattctctgtctatttgggctcatttttggttttatatgaatttaaaaagtttttttctagttattccaagaatgtcgttgtttgtttgatagaaatagcactgaatctgtaaattgctttgggcaatatggccattttaacgatattggtccttcctattcatgagcatggaatgtcacacaaaccaatgatatctgtttgtgtcatctctgatttatttgagcagtgctttgcatttctcattgtacagatctttcccctccctggttaactgtattcctggtattttattctttttgtggcgattgtttcacctgcttctaatcaaatctatttagtagctgttattaaactgtgtagccattagtatacagtagtactccattacccttggctttgctttctgttgtttgtcacccacagtcaaccacagtctgaaaatatcaaatggaaaatttcagaagtaaacaattcataagttttaaattgggtgctgttctgtgtagtgtgatgacatgtgaggtggtcaccatacctcctgcctgggaggtgaagcatccctttgtccagcagcttctccatattgtctatgctcctagcccttcagtcacatagtagctctcttagtaatcagatcagctgttgctgtatcacagttgtaacttgtgttcaaggaaactgtatttcacttcttaatggccccaaagtgcaataatagtaatgctggcaatttggctatgccaagaagccataaagtccctcttttaagtgaaaaggtaaacactctcaacttaacaaatgaaagagaaaagatcatatgctgaaattactaagaacttcagtgtaagaatgtatcttctgtccatgaaattctgaacaatgtattgttataattattctattttgatagttattgttaatctcttactgggcctaatttataaaaattaaactttatcttgggtatgtatgtataggaaaaaacatagcatatattgggttcagtaatatccacggtttcaggcattcactgggagtcttgcaacatatcctcaatggataaagggggactactgtatgcgcaatatatgtatacgcttaaaaagagttttgtttagctagtgtgtgtaagaagattatcacaagtcacactgtagtgtttgccttttgccagtctgaatgttatcatcagtctaatattttatagcaaagatttaagttcattgaaaacttccctatggaaacacttccaatcaagacctacagcaagccatgaataaattaacatttaaacatgaaaactgatatttgaagaagaattagcaattaataatttctgctagaaaatggtggtttctcagccaatagctataaattgtataatatatgtaaaaggaaatatatacaaatatcatatgggacatatatcacatatactactaaaattgaaaattgctataaatagaagactatgttccaatgtccactgatttttttttttttaacaatctctagtcttgaaaatgccactatggtaattctgtcaaatttgtaatggttgggatttgatggtagtgcttttgaaacctgtattatctaatggaattgtcatttatattatatcattttcacctaaaagccaaatacaataagacttaaattatttttgctttttttgtggatagtcatttttgtgcccaaagggctaactgatgccttcagttatacatgaacaattcgcactaacgtcaggaagaacagtgtgcatataacctagggcagaatttggtctatggaatgtatcactcagtagtggaatggagattatgactttatttaaacatggacttgagtagttttatttttccttactgtttcccttggcatttctttctctaaagtgcaacattcaaaagtattctatgcagctgtagtgtcctggatgcataataagggcatatgttcaaggcaagtttaaatatccacataagccaaagacagagtaattaacattaaaaaaattaagacaacttttccaagaatgaaaagctttaatagattagctaattttagaattatttaacaacaactgtgaaaaattattagtatttacaaatatgtatatataaatatatgtaatgtcttatgttagacagcaatttcattctgctctctaatgattacatgacatacttctgaaaaaagtcaaacagtgtgttctagaaggacaaagaaataattggttcagttttgcttatacttagtgttcaattgttatcaacctggggtgggaggaagggaaagaaagagggaaggacagaagagagcaagaaaagaaggaaggaggagaggaaggagagatggaagtcatgtgacatagctagggatttggggcaaaattcaagacccatgttttccttgatggaaagccaaggaacctgagaaggagagtcagcccatgccaatttcactgtggtagaggtgaccaagaaagtttacattatggatgtatagtaggtaattttaggttgtttttgtctgggatataaacccattgtgttattccagttatttggccaaaatgttccatgcaaccattttggagtgctagcactttagggaatttataaaaaggggtggtgttcagtgtctgggttgaatacaaggtaggtagaaaaggacaatcaaaggaattagctgcaaatgagatgaaatctatgggaacatatattgagaaaactagtgaccattataatttaatcctctgaaatacctgcaacaatctgagaacaaggtaggtggcaagatgcatttataaatattaaagaaacacaagaccccatacactttgaaaactggggagtaccgaacttggagaggtctagtataggtagtgcttgttggtttgcatatttttaaaaccactttattgaggtctgattgacatagaaaagtctgtccatgttgcatgtatgcaacttaatgagtctaaagataaatatatgcccatgaaagtatcaccataatctgtggcataaacatatccacctatttgtttattcttaattaaactttttcctgagataattgtaggttcacaggcacttgtgagaaataatacagaagtcccatgtaccctttactcatttgttctcatcagtaacatcttttataactatggtacaatattacgaccaggatatggacattaatataaccaatattattcacatttcccatttttcatatattcctatgtgtatatgtttagatccatatgattttattaaaattttatccaccacagccgagttgcagaaaagttccatccctacaaggacacctcaagctgcctttttataaccatgcccactgtctcccttcccctactgctgccacaggtgtccctaacttctggcaaccactcacttgtactctatttctaaaatttggtcttttcaaaatgttgtatacatgacatcacacaatatgtactcttttgggattgtttctttcttttttactcaacataattccgtggggattcattcaagttgttaagggcattgatagtccaccttattgcagcatagcattccacggtatgtgggtaccatggtttgtttaacccttcacccattgaaggacatctaggttaattctagttttgggttgtatcaaacacagttaaagcattcgtgtggatgtttttgttaacatacatattcgtttctctggaataaatgctcaagagtgcaatagcgtatggcagttgcatgtgtgtgttttaagaaactcatttccagagtggctgttccattttagaatcccaccagtgatgtatgagtgctccagattgtgcacatcctttgtagcatttaaaataaaggctacatttattttactatttaaaataacattttagccattctgatagataatatatcactgtggttttattttgcatttctttaatgactaatggtgttcagcatattttcatgtgcttatttaccattcatatgtccaattcggtgatgtctccccatgtcttctgcccattttctaatttgattgcttatttgtagcttgctgtttttattctttttacagggttttgctgagattgattaggtccaatttatcaatctttcctcttatgtattgtgttttccatgtcaagtctatgaagtcttgcctaaccctaaatcctgagtattttttctaaaagattttttttattttatattgttaaatttaagtatgtgtttcaggccaggcatggtggctcatgcctgtaatccccacacgtcaggatgctgaggtgggtgaattgcttgagcccaggacttcgagaccagcctgggcaccttgtctttacgaaaaattggctgggcatggtgctgtgtgtctgtagttccacctatgggggaggctgaggtgggagaatcagttgagctctggagtttgagaccagcctgggcaccttttctttacaaaacattggctgggcatggtgctgtgtgtctgtagttccacctatgggggaggctgaggtgggagaatcagttgagctctggagtttgagaccagcctgggcaacttggtgaaacctcgtctctactaaaaatacaaaaacaattagccaggcatagtggagtgcacctgtagtcccaactgctcaggagctgaggaaggaagatcacctgacctcaggaagttgaggctgctgtgagcagagatcatgccactgcactccagcctgggcaacagagtgagaccctgtcttaaaaaaaaaaaaaaaaaaaaagcctatgtttcactttgagttaatatttttttaaggtgtgagatttggttttgagcagtggatgtccaaatagcccttagttgaaaaggctatatccttccttcactgaattgctttggcacatttgtcaaaaattagtagaagatatttatgttgatttatttcagaattctatgtatatccttccaccaattccacatgttcttgagtactgtgagctataatatctagtagagcgactccttctactttatcctgctatttcaattacaaaaaataataaaccttttagggcctatgattttccatataaatttcacaataagcttgttgatgttttcaaaatatcttgtttagattttgataggaattgcattatatctatagatggatttggagtgatttgaaatcttttactatattgagtcctctaatatataaacatggtgtaagtatcaccatttaggtcctcttttattggcattttgtaatttttagcacatacattgtattagtctgttctcaccctgctataaagatactaccagagactgggtaatttataaagaaaagaggtttaattgacttggtttcacatggctggggaggcctcaggaaacttacaatcatggtggaaggtgaagggaaagcaaggaccttcctcacgtggcgtcaggagagagaagagtgaggtgtgaaggggaaagatccccttattaagccatcagatctcgtgagaactcactcactatcatgagaacagcatgtgggaaactgcccccatgatctaatcacctcccgccaggtgcctccctagacacgtggggattatggggattatacagttcaagatgatatttgggtggagacacagccaaactatatcatacatcctgcacctgttttgttgagcttacccataaagtgtttcattttctttttggtgattgtaattggttttgtgttttaaattttggcttctgcatgattattgttggtatatagcaatgttatgaattttctagggtgatcttgtatttcaaaactttgctgaactcacatttatagtagttctggaaattctttatttgttggaattttctacatagacaatcatgacatctgaatttggagcagtttttttaatctttccaatatgtagtttttatttctttttccttactgcagtgactagaatttttagtagtatgttgaataagaaaggtaagagcagagattcttgctcttcttgttcctaatcttaggaagaaaaagagttcaactttcaccattaagtatgatgttagctgtagattgtttgggtaagtgttctttatcaaattaatgaagttcctctctattcctaatttcttggagttttgagtattaaatattgtcacaaggcattttctgattcaattgatatgattatatgatttttcttctttagtctattaatgtggttgattacactgattgattttcaattgttgaaccaaccttacatacctgaaataaatcctacttggtcatagtatacaattatagtatatgtagtatacaattccttttatatagtgctgaattgatttgctcttctttctctagtttcttgaggtagaaacttaatgttttaagatccttcctcttttctcatataagtattagatttagcttagtgttgtaatttaatgtgtaatttaatttagtatttaatttagtttagtgcaataaatttccccttccacgctgctttagcagcatctgacatattttattatgttgtatgtttgactcttggacaaaatgagggcttggggtattgactcccgatggagttaaaaatttgcatttaacttttgaccaccccaaaatgtaactactaatagcctactgttgaatggaagccttaccaataagataaatggtccattaacacatattttgcatgttatatgttttacgtgctgtattcttataattaaatagagaaagaaaacattgttaagataattataaggaagataaatatatatttactattcattaagtgggagtggatcattatataagtcttcatgctcattattttcacattgagtaggctgaggaggaggagaaagaagggttggccttgttgtctcaggtggcaaaggcagaagaaaatttgtatataagtgaatctgtgtagttcaaacctgtgttgttcaaaggtcagctatattttcatgtgcattcagttctatgtttttgaaatttcctttgaggttttcaaaattttcttttacaactttctttttgactcatgggttatatagagatgtattgtttagtttcaaataaattggagattttaaatattataattctgttattgatttcaaatttgaatcattttcaatcagagaacacattcagtgtgaattcagttctttaacatttgttcaggattttttaacaggccagaatgtagtctatcttggtgaaagtttcacaagtatttgaaattaatgtgtatagtttgttttgtgtttacacacgcacacaaacacagatgcatacacatataaatcttctgttatctttttatttctatttaaagaacttcttttagtcattatttaagagtaggtgtgaagaaaaccaattctcttataaatagaactaagtacatctactttgtatacttttcttgagtgattctatattgtaatgatgtcctttttactagttctatcaattgctgagagtttgctgttgacgtccctgatttaattgtgggcttatctatttctcctttcagctgtatcagtcttgcttcatgcatgttaaagttctgttgttaggtgcatacatgtttaggatcattaggtctttctagtggagatatcattttatcattatgtaatgtccctcttaacctctagatatttggtttgttctgaaatctatgctatttgatagttactagttattccttttttcttttgattaatgtttgcagatatatttttctgattactaatttcaactgacctgtgttgatgtccatgaagtgaatgttgtacagatagcatattttttggatacttttttaaaaattaagtttatattctaatacactctgctaatctctgtcatttatttgtatatttagaccatttacatctgagattcttactgatatgctagccttatgtgtgcaattttattttttctatttcttgtctgttgtgggtctctgcatttctcttttctgaccttgctgtaggttacgtgaacacattttaggattctatcttggtgttttaacagcattttgggtatatcttttttgtatagtgtttttagtggctctaggtattaaagtatatgtaagtcacttatctactgacatggacatattactacttccattaaagtgtacttttatttccacttaggtcctttactcattctaccttttcagtataattgtcttaagtgtttcccctacatacagtgagcatcacattacactgagttgtaatttttgcttcaaccgtgaaatattatctagcaaactaataagagggaaagtctaacttatttccccctaattttattcattctgatattcttattttctttataagttctgaagcttttattatcattttgtttctatttaaagaacttcctttagtcatcctttaagaatgggtttgatgaaaacaaatactcttatttttcactcatctgagagtgtcttgatttttccttcattccgaaaggatatttttgctggatataaaatttatgattgacagttaattgctttcattacttgataaatgttgtgccactccttctggcttctaatttttcagatgagaaatctgttgtcatttgaactggtatttacttataagttttacatcattcctctggctgctttcaaggttttctctttgcttgttttgtatttagcagtttaatagtgaaagccctagcatgagtttccttggttttatcctattgtatgagatttgctcagcttcttgcatgtgtttgttaatgtcttttgccatattttcagtattttcagacattctttcttgaatacattttcactgccattctctcctcttattctaggattccagttatacaaatgttaactcttttgtttttaactcactggttcttgaagctctcttcaagtttttttttttccttttaatctctcttttcttatttgttcaaattaggtaaattcttttgatttccttcaggttcaggaatcctgtcatcttcctgttacccttgaacccatatagcaagtttgagtttgtttcaatggttgtatgtttcagttatttagtttccgtttggatcttttatatatatatatatatatataacttctatttctatgctggggtttctctcattttttttcttgcttgaaagaattcacaattgcttgttgatgcatttttattgtatctggtttaaaatccttgcctgataattccaacatatgattcatatcactgatggcatctgttgatcttcttctttcattcaagttgttattttgatggttcttagtatgacaagtgatttttattatatcctggatgttttgggtatcgtagtatgagactctggatccaaattcatcttctttttttattcagaagctgtccttacattgaggtgtgcacagaggccaggtgggtgtgtatgttcattcatcaccccgttgtcactgccaacatcatccagcagaagtggagcactgactcacactgcagcagatgggtagggtgaaacttcagcttccctgttgaccccttcccagtgaaagcgggccgcctattgctgctgccttgttgcccctcatggtgacatattcctaactccccactgagccacggaagggaaaaattcattgcttgttcacactactttgttgctgcagggtaggggtggaagctgagcttcctgctggtctctgtgacaccaggggaggtggggaatggagtgtcaagtaaccctcctcctatcaccttattctgcctcattgatgccaggtgtgagagaaggttctgcttctctccagaactctcccagttcttgtgaactgggtccaattcacaagaaagggaaaaaggatgtagagtattgattggccctaacacctagcacacagtctcactaataccactgggagtaggggctcagctcccctctaggccctgctcacttagtgagggtggggtgggaacagaatggagactaaccctgacacacaccacctcatgtggtcttgtgctgtgaagagagtggagaggttcattccctccttggtcccactgacaccagaggttggagtaaagtaaagtgctgatgagccctgactctcgtgtccttgtttagtcttgttaatattgggtggatgttgagcttcagctcctgactggggccctgccagagccggggggaatgtaatgtgctgactagtcctgccttgcaccacttcactaagtcttgctgctaccaggtaggggtggtggagatggtttagctacttgctgggctgaggtgacactaacttagtaaagagttggagcatggctgactcctttcagacaggggatgaaagatcagccctctgctcactctgccaatactatttagaaaagagaatcagagtggcacaacttccactgagcagaggacagaaaataagctccttatttggtctcatcaaaaccacccctacctacagttagacagctgcctgtttcaacaagtggagaatggaagatcagctctctgtttggtttattggaaccaccaggcaaggggaattggaacactgactgcttctgccagtgggaatagaaggttagctgcctcttggccctgtcaacaccactgtgaaagggaatcaaaaactactgcttacttctgttgggtgagagggtggggtgaaagattagctccctgatgagctcggctgctggaactatgaatgtgtgtgagtgtgtgtggggagagagtgtgtgtgtgtgtatgggtgtgcttgtgtgtgtgtgtttggtttttccattggagtttggctaaagtatgacaggtactttttgctaaaaaggttttctcttgtaggccaacattttcctgatcttctgtctaggaaaataagcctttccttggagcttattttgtctgtgcctgttggtggttctacgttagatgtttctggatattaaaacaacaacgaaaactagggaatttgccatgttgttcctcaagtcctcagattcctaattttttttcttctacctacttcgcaaagtcatcttacacttatttgttttgttatgttcagggctttttaattatagaaagagaactgggaggaataaggctgctccatctctgtcaggatcagaagtcatgtagtgttataaaaaggactttgtctaccattttaaaatagctgttggctgtaagctccttattgtatttaaagtatattggctaaaattgtgggaggtaaggaaaactctttgtaaagtgaactgacatggtgaaaagagagagaagatatgcttgtcaaatattgcgaagtctattcagatcaagctagacatggtctgtattagtcagggttctccagaagaaaagaaccaataggaggtgcatgtctgtgtgtgtatgaaaaggaatgtattagggagaatttgctcacatcattataaaggcaatgtcccacgacaggctgtcagcaagctatagaatgatagaagccactagtatgtctcccaaggaaggtgatactatgtctcagtccaagtcccaaagcttcaaaaccagggaagctgacagtgcatcccatagtctaaggctgaaagcctgagaacccccagatcccccagagaccactgctgcaagtttcagggtccaaaggctaaagaacctagagtctgatgtctaaaggcaggaggaagaaagggcattctgcactggaagagaaagagagaggcagctcacaaagcaagaaaagcctgcaagctgaatatcccccttcttctgtctgctttactgtagacacacctgcagctgattggatggtacccacctacattgagggtaggtctttctctcagtccactggcttatatgtcaatctcctctggaaacaccgcaatagatacatcaagaaacagtgctttaccagccatctaggtatccctcaatccagtcaaattaatattaaccatcacatggcctattcacaatttaaaaatgtagcataaattgcagcagtggtcaagtgtattggcaagttgtaaagtgcctataagaaacctatacacgagcatttgcagattcccttaacacttttcagcaaatattttgttacaattgaaattaaaaggcagtttgaaattgttcctctactaaatatcacactggatatgaataaaataactagatagactaacaaggtacatactttattgcctgtgattattgcaactaccactcctggtggagagccattcttctcaggtgtgcaagtggaagattaattctcaatcaggaatatagatttgatacaaggaaagcatttcacttggcattagtgtgtcaacatttcagctaatttgcctaaccacaaatacttcagggggaagagaaattgctagtgctttatattaaacattggatggagctggcggagataatacaatttgtactttttttacatagtttcaacgaattttggcagatatgtctttttgaggcaactttagatgttgaaaagctgcttgtggatattcaagacttgtctttttttcatgttacaatgaccatcaccatagtttgtatctgattttttttgtgtgaattgaggaatgtggagtcataatgcaaaagtcattgccataattctttgcagatcttatgactggaaattcttgtgtatgtagtttgatattcatttgtaacacatgtaactggttcgtgtaatgattaaaataataagtaatgcttgatcatggttaaaataaataccaaggataaattcttctattaattagtgtaagcttatcctaattaacatctttaattatgggctgttgttaatttttgtcgcaacctattagatatactgtcctaaatcattaacactagtgtaactgagcataaactctaggtgactcacggctacagtggaagcgcccatggaaaatatatatttctaagtacacagtttagataatttcaagcagaatcagaaaattcttgatgaattctaaatttagtataaacagaaatgtattaggtttggttattgagccaagcttcaaacattgaatatcagaattgtgtccatttgcaatgagtaagcatttgattcaagatttttttttgtactcagactcatttttgtatatctttctgtttaagtcatattgtatttactgcgattacagattttttacatatttcttaaactggttctatgttatgccattatataacaggtgataaggaatgtactgtcactgccccttgacaatgaaaaggggacatctctactagtgtatgtgtatgtagctgtggaggagttgaaacagtgtaagtgaaatgcctagaaattgtcctgagttttgattttgtttgtgcttacatttttattagtatatgtactttcttgaatagataattgatttggggcaatatttctcaatcttggcactactgacattttggactggataattattggttgtgcctggctttcctgtgcattgtaggatgttcagaagaatctctggtctctacccactagatgccagtagcaaacctgccacctctctgcctacttccgtcctgtcttgcaatagtcaaaaatgtctgcagacattgccaagtgtcccctaaggggcatgagccttggtggagagaaacttctttacagtctcatccttggcgatgtcatttccttataatttgcgtagttaaacatttttgttttgaggagcataagttgtgataccatacctgtacagaagaggcttggatttaaggttaaccacatttaactgagagaattttatcaaagcatgaaataagaaaaataggggcaaaaaatgaaattctaaaatggcttatgcaatttctaagggtagctaataagaattctgaattggtgacattgtttttaaaaaaagtaaagcattaaaagaatttcaaagataaaatatattttttggagtgtgaacactgtaattaaggagacccaataatgttaagttacttaaaggatgtatttttacttaaagtaggatacaagttggagaaattaacattcggttgattgttaaatattttgattcaaagaaagaacatagaattgtcagcctcaaaaaatatgcttaagatagaaaaataattttggttgcatgaaaagaaaaagattttagtaaattgttgacttgaaaaggggaactatttgacagaagtctcaacagtgttttggagtggcatagtgattggggggtgacatcagatgattagagttaaaaacgactggaccggctgggcgcggtggctcacgcctgtaatcccagcactttgggaggccgaggcggctggatcacaaggtcaggagagcgagaccatcctggctaacacggtgaaaacccgtctctactaaaaatacaaaaaattagccgggcgtggtggcgggcgcctgtagtcccagctacttgggaggctgaggcaggagaatggcgtgaacccgggaggcggagcttgcagtgagcggagatcgcgccactgcactccagcctgggcgacagagcgagactctgtctcaaaaaaaaaaaaaaaagactggaccagttattaggccttaagttgatgtaaactatatgacaaattgacaatttagagacattgtggggacatttctatgaaacgtctgtttattattcattcctgtgatgattttgaaagggcaaataaaatcataatcacatattgtataatgctttttgtctttcaaatacatatacattaaaaatgacttatataaagcaaaatgtacctttttgtgcacaattctattggtttttgtggatgtatactgttgcataaccaccatccaaccaatacacagaagagttctataacttcagaatattcctttgtgctactcttttatagtcattcccatcttcccatccccaccctctattgacccgtaaactgttttctgaataaatatctgggaaaaggattgctgtgccacatggtaggtgtatgtttaaagtttctcagaagttgacagactttttccacggtggctgtaccattttgccttctcaccagcaaaatgtcagattacagttgttttgcatcctggccagcacttggtatggccacttcatttatttatttagctcttcttctgataggtgtttagtggtatctcattatggttttaatttacacttctctaatgattgatgattttccccggtgactgatgatgattgaggatcttttcaggtgcttatttgcctcccatgtgtgtatcctctttagtgaaatgtttgttcaaatcttcccatttcaaaaaatgttggcccttttcttattatgaaatttctatggctctttatgtcttgtgcatagaagtcctctgtcaaacagatgtctgttttgcaaatattttcctgatttgtagcttgtcttctcaatattttaacagtgtcatttatagatcagaagtttccaattcttcaggtctggctcccctccataatctgtttgctttgattcacttttcagcatcctcatgtagttgctttttgtgtttggtctgagattttacttgtgattggcagggagagataggctgaacgtgactgagtggagtatagcatgagaagacttgcataatattttttttaattttcagtgttttgcaaacattatttttgatccattaataatgttaatgattgccattttatatacgagaaaataaaaaaatcaagagtcataagagtttaagttcataaataataaaaagccacatggaaataaccagtgatctaaatcacctggaacaactaaaaccttaaggtattatatcctagtttgtgtgttccgaccacaagcccctagaatgcaaattacttatgtaccttatttaattatgtttgctttacgtaattttagtactttaggaacttccttgattaaatttcaattcatacatttgctgaaaaataactaattttaaaactaagtaaggttattaagtaacttttttccatctggaggagaattgtttttgttccagattctttactgacacaatagtagcacactcgaataagtgcatagtatgcttcatggaagatcatgtgtaaaagccaggcttagtcaatgtttcttctgataatacatgtgaaaagttgaaaagaacctttatggtcattttcctagtaagcaagtcaattccttttgcttaaagcattttaacttcattaatgtaaaagacaatagatatctactatgtatacaacactttttaagagatcttgaggttacagaagatagtaaagccatggtgtctatccttaagaagctatacataataagaaagaaagaaatctcactgtgatattgagtatacatttttggaaagtaatttttgaataaaatcagatgttttaaaaaatcgtaaaaggttttgaatcaacattttcaaatatttagaaaataaatgagaaaaaagacagacccaaccaattccttccagtaattttgctctgatattaatgtaattcccttcagcttttatgtgcatattatatatgttattaaccatagtacatctttaaaacatatataattttgtctgctcacttttttttaaaaaaacagcattgtatcacagtttattttcatgtaccttcatagttcaaggtacaagggaagtaacagagattccctgagagaagacaatggatgttcctaagaaagacctagtgtgagagttcagggaactgctacactttggattttttttttttttttttttttttttgagacggagtcttgctctgtcatccaggctggagtgcagtggcacgatctcagctcactgcaagctctgcctcttggggtcatgccattctcctgcctcagcctcccgggactacaggcgcctgccaccatgcccggctaatttgttttgtatttttagtagagacagggtttcaccgtgttagtcaggatggtcgggatttcctgaccttgtgatccacctgcctcagcttcccaaagtgctgggattacaggtgtgagccaccacacctggccaggattggttttttaaaataatgtagaatgttttgtatttgtccttgcatcatgtaaagatttatccttaaaagtgcaatttgtctttggactataaactctgcgagggacaggacagtacttacatagcatgttaaaaattcaagtatcaatctacccatttaggtctattggctctttactgagtccagggttttatttacatgtatcactgaatgaatggccttaagaaggtacagatgagactactgaggcatagagagatttaacagaggcaagcagagcatcacaagcagtttggaactcaacacatgtttcttgtttgaaaatatgcacagacaaaagagggatggatagaaagttggttcaatataggattaagacctggaacaaaagcacatgggcaccagcagaatctacttgagaggtcacagcgcccaaggggaaacaaccctaggcaagtcacttaacctcactcaccttagttctcttgttggtaaaatgcagagtttatgcaaactcaatacatgtcaagaaatatctgcaaggcattgtttaaaattgaccctctggatttttttcatgcatgcctggttattatttattaagatgtactaggggcaagtctcaaatggaagaaaaaataaaaggcacatctgcaaagtgaagaagtggggttaagcgcaatgcaacagaaactcttatactaatccaggaggactttacctgtcaatcaaatctatattcattttttttaaagattaataatggtttgttaactgagtaagctggcagatggtaaagtaatgtgatgagatcttggggcatctatgaccagttgatgactgactgaccaatttcaaaagatgctatgaaggatcataaagtttagttccatgtggattttgatgatagttgcatctatatttaaagccttctgtcactggaagcactcttggtgttgtcagactgtctattggactggatgagctgcaacttctcgcaattgaatgtcaataagaccaaagcaattttggttgattcatagcaccagcttaagcatattcacttgcacagattacatttgacagatagttaccttcagctgaactctgtggttagaggcttgggcgtattcttgacagtgagcttagagttgatgtctaatgtttatttcatatcctgtttttaccttccctaatattgcatgtgtaaatctatatttaaatatattcacagctgatgttcttgtcggtccacttgttatctctggacagaatgctgtaatgattcaatttaattattttaataaaaataacttgcacccctccagttttaatttcaataaatctgacgagtaatgattaattttaaggagtcttattgatgagcaattgcaacactataatgcaggaaaatgcccaagtggtgggagcatgcttacatctatagtaaacttaaaaccttcaaaatttggtgtgtgattatgaacaccgaggaaatatatccacatttatttaccaaattattattcctgtatcttttttaagttatttaggtccatcagttatcttcaaagtttaggtttgaaactatccatttcaagaatattagccttttaagatgattataatttaaataacatattctaaaatgttttaattgaacagtagaatgcatgtaacccaaaacattataaaatttaaaaagtcacggccatttttgaatatttagattgggaaaacacttaagatgtggttttatgttcaagaagaggtgcaattatggtatggattcattcatcattatggtattgtattgtcaacttttcagttatgttcaatttttaagatgctgggtgggaaatttaagggacatatagatctaataatctgagcctaaatctcctgctctatacaaataactctgcaaagctttggaatccctttatttgactaggtgaatggcagttttgtttgcatcagcctaaacctagcttggaaatcatgattttaaagcaaacacgttttcctcacacatttccatatttcctagaatctatggttttaagatatcaaacaattcaaattatgtagttatacatttcacacaggacaaaaactcatgctgaagtaggtaaaatatttttcaaaattattttctctacatttactggcatactttctctttcttactgtcttttaaaactgacagtcagttttttttatttttctcttttactgacagctagtaaatgtactgacagttcagaagcaagatgtaaatgtaagtcactattattttgttcacctgatacctgagcattagtagaaatgcatggctatattttaaaataaaaactagattatttccaatggttctgaagggaagatgtatagaaaaactgtcctctgtaaataaaaatgtgtttgaggcaagattgcattacatttagaaatagcatactttcctcattaggatgtgattggtatttgtactgaagaaaatgggctaattatttaagtaagatgtatatttactttctgtttcattagctgtaaatctttatagcatataaatctcctttagaaattaatgggaagtatataagtgagggaaagaaagcaggttatgaagttaataaataccatgttaaaaattagtttctacttaaatataaagttcaagattaaaaattaaaaattgttttattttaattagaaaaatcttgcttagttaatttctctggaagaaatgctatataagcagttaaatgtggagaattatattctattgataaaagtatgttgggccagactgaaccaacaacatcatagaaggactgattccttacttcctttaaaaagtgatctgtcatttgtctacattataaataacagctgagttttaaaacacaaggagatttttaaaaagtggcagcatttatttatttactgcttagacagtattcacagtattttatttcatccttaagactctttttttgttttgctcccacattattgttacacatatgggaattggtaaagtgggaaaacttagcatttatagatttttatactgaagcatgcgatgataaagtagtcactttcatccaagaaccttttcctcttttcacttacactagctcttccagaaatggcccctttagtgcctttaatggttttattctccttctgtcactatttttaatattcttattcttatactgccatcatatataactttgtgaaaatttgtcatataaggttaaaattgatttgcctttaaatacagtagtttccattttctgttaactgtttgaagaacacctattgagaggcaaggaaagacctgcgggataagttacaaaaggcaagaattcctcacagaaaaagcagcaggagcttccttgtcaagagcttcagcaagtagtgtcagcagcttagaagttgctattggactgctgagtgttatgcagataaattgtggctctagcttgtcctccgatgtcattctttgatttttctctgttaacactgcatttgcatttgggtctcactgagaacaaggaccagtgcaaatgccttatggcatgtgtagaaagctgcttttatgttaaaagtgatatgttttcttgttcactgtgttcacaacaaaaattcatcttccgagtcttggaattcccttatgtatttgtaattttccttccaagtcataatattcatatacaaagagtggaaatttttctttaaaaaaacctaccaaacaacaaaaacagtaaagttagttggttactagcagcaacaactgaaaagcagcatcaccaaaacatatgcaattcatgggtttccagcaaaagaggaaatctggaaagagaagatccttaagtattgctttaaagtgagcactgaaggacagccgttaaaacaatcccaatttttagaaaaggtattattccctgacatttacttgttttattcccttctcaatctgaagacacattttggacagatgctcttgtcttacatgaacattcaattcatttgagaaaataatggttatacttaaactcgtgaagtgaaatgtatggaagtctgttgctttataactttaaatagccatgtaacttgttcatggcagaatatagtcaagtcctgggcaaggactttttttctcttctccaataatgctattcaaggggaagctagttattgtgtgacacatgcttgattctcaggaggtttggacaaaagagagggttagaaggtcaggagagcctgacgctattcaactagatatttgagtagaattcccacaccagaattttgcctcatacctaattcagacagtgtaataatgggggaagggcagagagagggagggcagatggaggtgtcctttcaggttaaatgttaaaataagggtcttcatttctgtctctggtggcacagagcattaaaaaccctgtgacacattttggaagtgttgctataaaatagattttaacgtttgaggatctataaagggtattattgagtacttaatagattctgtgtttgcctactgaaatcactacaccgccgatatatacctcattaatttgtaaagcagtttggcccaacttgagacaatgtactgtattaaagcaaagtctatatcccaaattttcatggctaataattacaaaacgttcagcatctgaagaaaattatctaaatgtgacaatattggtcttggatagtttaacttgcgtgaaatatttcacacagaaacatttgatctatattgaagagttgtttcttttttcatcagatcagctatatcacagtaaattgtggaaatagaaaatggaaactaaattgttgaaaatgcatctgatagtttgtttttattgccaaaatgtcattgtccttgaggtccatcactttgtagcttagtaaaaacagatttaggcattgcaagtgagaagtcattgactgttttccttgtaaccaatttatttatcaagttggtaagtttcagaagtatttccagtgttcagcctatttcttcacttttctattttccaaattatatcctattacttcaaagatgtataaagttcacacattctggattctttatctcttttattgttttctgcttcatacaaagtaattaaattatgttcttgaagtaattcctcctatcttacttaaaatcaccttcatgatctgtcaagagttttcaagttgttctgtgataaagttcttagagtttgagaagctaaatggtggagttggtgcttaagctcttcactgaaagctgcaagagtataaacgaagtcagaaattactattattattatttttttctcattgagacggagtctcactctgtcgcccaggctggattgcagtggcgtgatctcagctcacggcaagctccgcctcccgggttcgctccattatcctgcctcagcctcccgagtggctgggactacaggtgcccgtcaccacgccaggctaattttttgtatttttagtagagacggggtttcactgtgttagccaggatggtctcgatctcctgaccttgtgatctgcctacctcagcctcccaaagtcccaaagtgctgagattacaggcatgagacaccacacccagcatatatatatatatatatatatatagttttttggtttttgttttttgtttgtttgtttgtttgtttgtttgtttgtttttttgagacgagtctcgctctgtcgcccaggctggagtgcagtggcaggatctcggctcactgcaagctctgcctcccgggttcatgcctcagcctcccgagtagcttggactacaggcgcccgccaccacgaccagcaaattttttgtatttttagtagagatggggtttcaccgtgttagccaggatggtctcaatctcctgaccttgtgatccgcctgccttagcctcccaaagtgctgggattacaggcatgagccactgcacccggcctgaaatgactattctttttaataacttctatttattgttttgtgttattcataattgttgtgcaatttaatttatttcactagtagaacactatgtacaggactgtactgtgtggaggttttagaagtgacaaaaccagttaactaggctcttggtccaaaggaatttagtgaaagagataagacataaacactaatgactgtaacatttatggaataataaataggagctgctgaaagttgtgatttcttctcattatgatagtgcttcttggattataaaaaatttaacctagaacatgaggtttcaagaggcagagatggggagagaagaattccaggtttgggactaggatgtagaaaggcagaaaggtgaaaatattcttgtgatgatggcaaacagtgactggtcaagtttgccaagagtaggttttatgcaagagcgtagtaagatgaaaccctgaaggaattttactgtcagatgatagaaaccggaataaagctgaggatacagttcaataatcaaagggaaccaaatgaaagttttgagcaaagaagggatcttattaaaacagccttttattatttcttttaagctagaggtagcttggcattatctgtgccagctcagagtgaccttcaccccaaaattctagttggattatggagcagttaatcttacaggctctaataattctgtcaccctttgttgtcattctatatctgtgtcccttcagttatgtgtcttctcccatattctcataccattatttctctgtctttcatttctttactttcatcatccacatcaggacaatgtttttattctatagtagtttgtaaacatgtcacattctttagactttcaagctctttgtcaacagtttttcaaagtccttgccttacataaacactaattctttccctttagggacccctttcctggcccttccaagcaaagggtgctcattcatccactcctcatgcacctcattgctgggagcaagtagagatgtagggattgctttcttctttttcttttacctcatattggaaagagatgtttcctttaaagctcatgttaagttgttgtgtacctttcttcaatttttgcatcaatttttgcaaaccttgcatcaatttttgcagctgctgacaccttggataccccagccacctgcctgccagatacaatgaaaaatttcacctctgactcacagtgtttctctgcatcattatcagcttttggttaatgaccatgaagcttcactttttcacctcttgaaaacttttggctacagaatgaagttaagcgcctaggtgcttatattgtctttgagtctgttgggttccttctaggttcagtttcttcacttctagcctagcccacaaggaaaatatctttagtagtcttttaaccattttcttttatttcattttttttcattctgttgccaccagacacctattctcaaatcattcacctgactgccttcttaattcctgtgtatagattgcagaatattactgaaaaaaaacaggtgtgtggattgaggccactaaaaattaatgatttccaactagagatggacccttagtgcagccttagggtaaatttcagaggtgcagctgattcaaagggtgtgcacaatttcaggggtatattgacctactgtcttcagaaaatgtttgactagtgcagactcctaccgaaagagaatcagagtgcctattcctcaaattattgttaatataaggaattatcttttctcatttttttctaattttatgggcaaaatagtatgagtgtattcttatttcatttagcatttcttcccctacctcgtacttatcttaccttacataggcttattagccagccacatgtattttttgcttctgggtaatagctgtgtattgttctcttatttttttaaataaaggggtctgcatttttattaatgactaagaaatcttgatatatttagaaattatatgtaaaaataattttaaattttttttattctactttaagttctggggtacacatgcagaacttgcaggtttatgtcatagttataaaaaaagaaagaaagcataggcagagaaggaaaatcactctggacagaaaaaaataattggttaaaatattaaagaataaaatttgtaggtaaaaataataaattttaaaatgacagtttaaaaatttatatgtaggctgggtgtggtgccccatgccgatagtcccagcactttgggaggcctacgcaggaggatcacttgagtccaggatttcaaggccaggttgggcaacatagcaagacgtcatctctacaaaaaaaaaaaaaaagaaagaaagaaagaaagaaaaaaaattagccaggcatggtggtgcatgcctgtagtcccagctactcagaaggctaagatgggaagatcttctgagcctgggaggtcaaggctgtgagccatggtcgtgccactgcactccagcctaggcaacagagccagatcctctcgcaaaacaaacaaacaaacaaattacatgtgaaaagaattatacgtgaagataataatttcagacatacaatcctatgttaactcccatagaaaattaagggagttatcacacctttgcttttaacaattctttctcttcccacattccagttttgttgaaataagcagagcttcttatcccagcttattgtagcaaaatcattatagtaaaatgatatttttatttcaagcattacaatagcactttataacttatttaaaaatttatatgatgttaaaaggattcaatactcattgagtatcctttcataacatacatctctaatttcttaatttgaattgagctttctatttggtgagagtatttctattctgaaaaggaacatggccagtgatgtaccttctgaatctttgcgtagttgagcctgtctttctaatgcctgtacccatgaacaatgtctggatgatgatggatttttttttcttataccctttcgtttgtgagcttttaatacattgcatcgtgtttctgaagagaaatctgagacaagcttaaggattatttttcactgtgggtgacccgtttttgtgtgcctgagtgagattcttacaggtttctttctttatccttaaaatcccaggactaccagcctatagtttggtgttaattaatctttgttttcttgagaatatggtaagcttttcttagctgaatattcaggtcatatttttaatcccttaattttggtttctatcatgtctttgagtttatattttcattatttgttttcttcgggctttcatcctgtgaaatttagtgaccaatatagttttattccttttatgtccaagatacataagaagttgtatgtactctagtgtccattcgttcatcaacttattccaattaccccaaacccctatttccaagggcttttcttcttccgttcagactctttatttgggtcttttcgtggttccttgcttaacactatgcacttttcacggcacacactttccctgggaattcttactcacaaccatgactcctagtactattttcatatgcatagttataaaacctgtaatttctaaatttatattgccacagtgctatcagtgagctttcaaaattcaaattcaagtatgatttttcttagttttaagatttcttcagttggaatggagacccttaatgacttagctctgacaactgttcagcctcatgttctgtaaggtctcctctgggacctcacattctagtaacactgagctgtctagtctttaattgtatccatctttcttatgttgctacaactgcacatgttctttaccaagaatactctcccttactatttattccgcttaatcctactttttcctttcactcatttggcatcaacattttcaggaagccttttcttatctcaaaatctgagtagacatgcactcatcctttctatgaaattatcgcaatttactcaatgtgctttatttgtgtccatcactagactccagaacttttagatcaagaattttaccttatttagtgttgttcccttcagggctcggcatcatgtttgaatgtgatccattctcaataaacaaagtttgattgaatgagtgatggcatcatccagtattagaacaaagttgataggacagtttgtttagaagctcttgcaagaatacagttgacccatgaactacaaggaattgaattgcccaggtctgcttttatgtgaattttttcgagctaaacacagattgaaaatacagtacttgcaggatgtaaaatccgactatgcacagggccgactttttgtatccctgggctccgcaaggctaactgcgagacttgggtatgattagattttggttatttatgcctggatcctggaaccaatcccttgaagactgtacagatgagagatattagttgatcgaatatgtagcaggagaaaactgaaaaaggaaaagaaatttatgaagtaaattaatgagaccgctgcatttcattactactttggagattagaggaacaataaaggtgactttaaaattttgaaccaacttctttataacatggcttacaagtggtagctagaaagaggagggttggttacttttgctttgtatattgcaatacatttctgattgttccctttccacttttccccctagtattgttgattactttgtctttgtaaaaaacttcatcgtgaaaatttctttctaaaatgtaaatgtgattacctccttcctctccttaaataaacactatgctcacgattgctcacactccagagaatgaaatttccttcccttagcaacatgttcaagatccttcaaaatttgttagatggtgcctctatagcttcattgtccttctatgtactttgagttttaaccatgatatttttttgcctcccaaaatcatgtactttgtggttttcatgcaagctcttcctgtttgccttattcagttgcttctagcttgtacacttttccctctccctcttcaactccatttctttgtgtacgtatctcaatgaccaccacaaatacaacttcctctgtaaaacacactaatttcttctctccttttctcctctctgctcctatagcacttttttttcttattggctgtatgacatttattacataggcatattttattagatattaagtaggttttgcattaggtatatttttgaatgtactgaaaggcagatactttattcattcatatgtgctcagaagagcaaaatatctcttacataatgtatgtttaatataagtaaatatacaaacaaatagaaatattgagtttggtaaaagatgatattgagaaaaagtgatatgtgatagaatgaaaagctacatatattttctaaatgatgggtggacatttacaactttgctaaattatatattaaatcatctctttatcctgaaaaaattatcttttccatgattagtaagtactttacagtctcttctaggttataaagctcagtactctaattagttttagaaaaactgtgactaaactagcagtactgttttttctcccatattttgtctcacactgaagtcagtgatatttttttctgttcacagatatattcactcttagccttccctgagctctattacagcctggaaaataactggaatttcctttaaaataatacacattttcttaacttatcatattaaatgaaaaacacacaaacactggcctcctttcacattccctagaactttttgttttttctgtatttggcatttctgatgtctttaattttttgtgattctggctctgtattctggtgcctggaacagtgttgcttccaaataaataggcagtagtgatagcaatactcataaatattttaagctatttggaaaaagatattttttagaagctgtgttttgaatgaccttcccatttaactacagtgaatttcattcttagttccttcccaatatctaccctcttgcatcttcttttatgttgtttctaacgtcttttgcggtacctatcaatttactgtcatctactgttttcattaagattgctacttgtagatcattaataaaaaggtgaaataaaactaaattccttatcaattctctccttaagtcaataagtatccagttttaaatgacagtgcttgaattcaagttcatattaaatgttacttcaaataagtttgggagtttacacatacatggctctttggttcaattacatttgtcttatttattttgttttctgttcccttgtagtattctttgataaacttgtcctttaaaatatatattccaactaaactctgcttagggcctaagtggtgtagccctctggggagggtcgcaaatgtaatttgtttgattggatactcaagcttttcaattgttttcttttccttagagaaatagaacctttctagctttcaggtcaattgatgtaatggttggattcagatggaatgacactttctccccattgtaagtctctagttcctcagagaaatccttgggaaatctgttgacaacttgctgtcatccagctgttctgatggtataaatgacttagacactgattcctggtagtttaaaagtctaatggaacagtgaaattttgagatctcaagtgcatcatgaataaagcacttaagtagcacttgtatatacttcttacaatttgttaactggttttctgctttttttttttgctggagaaagagatttacagttttaatctgattagacattagcagctggttgaagatgctattactgtgaagtatggaaaagaacacaatcatgatgaaaactttttactcaaatccttagaagaagaaagcagatgaaattagattggcaaaggaaaccagcccaaattacacacaggagagaaatgtagcagaggagagtactgagttggtgctgcacgcatagagcttacagcctccatgggcaggggacatgtgggtgtgactgccagggacaggaattgcaaacagcatttggagtgacagtctgggtcagcttctcatgctctttcccatcaccaggcatcagcgagtggaaagatttgacctgattttggagcacagagtgtgggctctaaggccacaggaaggcaggtgaatgggactaggatgtagtggagtccccatggctaaaaaataagttgtattgcatacctgcctttgccccacaattatcaaatccaatctagggtgaatagaaacacatctgcagacagatccaatgtccacctacaaaaagtttcagaaaatgaaaacagatggagaaaaaaaattataaaaatataaagaattctggtaaagttgccaaaagaaatgagtcttctagtcaaatgggctttgttctattagtagatgttgagacgaatgcagtgaattgattagagctgatgttatttgtttgggtgcatacatgtgtgcctggtgaggggtgggtgagggaagaaaaaaaactcaaacaaataagaaacatattgagagaaaaataatacctagagaattaaaatagtacactataacaaagtttgtgagtgattattaaggcttgtgtgggtattcgggggctctctgaggtgtcaatatgtaaactgagatctgacagtaaagactcagctaccttatatctcttcatccctacatcttgttctaagaaaacatcagaagtcctgtgatctcagcataagttgaaaactcgtaagtagtcattcaaaggtggatttgtggagggtagaggtaaactaccttgattatatttacatagaatggaagtgatgctaatttagaaatgtccattgctgtaagtcttaggagatgtaaagtaccaatgaaagatcctgaacagtattatgtgacagaaaatgagcgttacacttttaaaaaaatattagatgttgtaactttagtcattctcacctttaccttttaagtatttcaccatttaatatcaaccttcattattgatttatttctaaagatatctggaaatagtttaggctcattaattttctttttaagagtcaaatcggcatgcaaatgtttctcccaccaagaaatttttttcctggacttcaccttctgaggcatgtccacctttgaggcaagctaagccaggctttgtgaaggcagaaccatccgaagcacacagccccaccaaatttctctccctccttccctccctcccctgttcctctctccttctctttcttttttctctttctttctctttctttctctttctttcttccttccttcctttctttctttccttctttctttctttctttctttctttctttctttctttctttctttctttctttctttctttttatttctttccttctctttctttctttttatttctttccttctctttctttctttcttttttttttctttctctttcttctctcttcccccctcccctgctctcccctgctctcccctccccttccctttctttcagctgctgcttacctggggtaacatggtttgggaagaaacatgtcagaattggagtgaataaatataaatgataaaaagacaaaatgaatattattttcaagagtaattaccagtatgaagttcttcagatgataacaaaaactattgacttattttgtctaaatcaatgccactatcttatctgtgtgattgtgaagggaggaaaggaaactgttcactgaatattctgcatttgacccgtaaatacctacttttgtattcagggatgatatattcttaccttaaattaatgactgttttctactgttcttttttggtgcaaacaaattaaatgtgtgcacttctccatgactgattgtgcaaaaactgcttagacaattactatctctctagcttttgatcagaaaggactaccttgaaacaatggccacaataatggtattattctcaattctagaatttatttaaacaaacaattcaaatcatatttcataatacagttctctgaaggagcttaaagagattcagatttttccttttgtttaacatggctcttcatttagtttttgaggcatatttttaataaattttgctcagtactgtctactggagctgaaaaaatctaagaagacacaaaatggctgaagcataggtacttacagaaaagcatgcctttcttttaagaatataaaattaatacattatttatttattatataatgggatgttctacccttgttgaagattttagcagatataactcatgcacagtgtaagtgagcattcacccctgttttgtttatatggcaggactatttctacaaattttacaaattactgtttaggatctttatgacatccattgagtgctggcatgataaatgattttctatatatctgtctacatattgagggcctgattgatggcccttctgacttggggtcagcagtgagttcacatctcttggtatactttggcttattccctggaagtataaacagaaatccaatgaccactattttcattattttccttcaggcataatctgacctaatgatatgtaactgtattactgtgatttaagagatttttaaaaaactataaacattttgaggaaaagtgaaaatggtgattttaaatttaacacatttaaatattcattttatgaaaagaatatttgaaagaatagggatttatcaggatcaatagaaggcttggagtaacctaatcattttaaattttattccttcttgtttttttctgttttcccacaacttattcactaccctctatattctcatactttgctaaatcatattaatccttcaagagttggtttagatgaagcttcattcatttgataaagattaaatgagtgtccagtagttgctagctcaccttgttctgttgtgcttcacagacaatgtgttttatttttatttttattttatttttttacaaagtgaaggtttatggcaaccttgcttcaggcaaacatgtcatatattagtgctatttttccaacagcatgtgctcgttttgtgtatgcttcacattttggcaattctcacagaaatttaaatttttttccaatcattatagctgttatggtggtctgtgatcagtgatttttgatgttattataatttcagggggtgccatgaaccacaccaatatgatatggcaaagttaaccaataaatgttgtgtgtgttatgacttctccaccgacagaatgttcttctgacttgttccttctccttgggcctccctgttccctgagacacaacaatattgaaattaaattagaccgagtaataaccctacagtggcctctcagtgttcaagtgaaaggaagagtaacatttctctcacttgaaatcaaaagctagaaatgagtaagcttagtgaggaaggcatgtagaaagttgacaggttgaaagctagtcctcttgcaccaaacagccaagttgaatgcaaaggaaaatttcttgagggaaaattaaagtgctactctaatgaccacaaaaatgataaaaactgaaacagctttattgctgatgtggagaaaatttgagtggtctggatagaagatcagaccagctacaatattctcttaaaccaaagtctaatccagacaaggccctaactattccattatgtgaaggctgagagaagtgagcaagctacaaaagaaaagttggaagctagcagagattggttcacaaggtttaaggaaagaagtagtttccataacataaaagtgcaaggttgaaagagcaagtgctgttgtagaagttgcaagttatccagaagatctagataagatcactgatgaaggtggctacactaaacaacataatttcaatgtggatgaaaaagtcttctgttggaagaagatgccacctaggactttcatagctagagaagagaaatcaatgcctagtttcaaagctccaaaaataagactgagtctcttgttaggggctaatgcagttggggactttactgcacaggtggtaggtgccctaacccccatattgttaaagggtcaatggtttatagaaataatatagaagtaagtgtgtgattctatctaatctatctatctagtagtatctgtctatattcatattccctatatatccatagtccctacagccatccactgaggggagagagtgggcctgggagtagtaacactgaaatagcacgaatctacttagcaccgaatctttgttcctaaagaccactcatctcttagaggaaccaggattccttggagaaatggctgattccagggctgtggtggggaagtacaaaatgagcctagaacatcttgtgtcataaagtaagaagatacttaaagaattattagaacatgtcaatatgatccagaatgcagctgtatggggtctatactgtccaaacctggaacaacttgagcactgaaatacatattgagagtaattaattatatcccactgagtaaaatagagactcatgagtctatatagataaaaataagcctaagcatatattgaatttttaataagcaataggatatttatacagtcttgaagtatctgctcgcaaaatgtttgctaattgcaaaggggaaaattgtatttttacagtgtggaagcctggcagatatattaatgcaaatgattaaagttaacatcattaataatggaacaaatagaaatgatgtaagacatgataagatataatatgatcactgtatcacctgaatttaatcatgaggaaaaattagacaaacccaaattgagaggcaatctacaaaataactgggcggtcctctttaacagtattaagatcagaaaagccaaggaaagattgaagaactctttttttttttgggtcggcactgcttttttattttattttattattattatactttaagttttagggtacatgtgcacaatgtgcaggcttgttacatatgtatacacgtgccatgttggtgtgctgcacccatcaactcatgatttagcattaggtatatctctcaatgctatccctcccccctccccccaccccacaaaagtccccagtgtgtgatgttccccttcctgtgtccatgcgttctcattgttcaattcccacctatgagtgagaacatgcagtgtttggttttttgtccttgcgatagtttgctgagaatgatggtttccagtttcatccacgttcctacaaaggacatgaactcatcagtttttatggctgcatagtattccatggtgtatatgtgccacattttcttaatccagtctatcggtgttggacatttgggttggttctaaatctttgctattgtgaatagggccgcaataaacatacgtgtctctttcagatcaaaagaaaacttagagtcatgacaactaaaggcaacatgtgatttggggctggaggtgttttttctataaaagactttttggggtcattgacaaaacttgaatgggctttaaagataaaatggtaatgatatacgaataactttgatgtttacatcgtgcttatgtaaaagaatgtctttttgtagcaaatacacgttgcggtattcagggggaatgggtcattaggtcaaaaatttaatctcaaatgggtcagaaaaaattctttgtactactcttgtgactttcctgtaacgttgagatagttattttttaaagtaataaaaaacagaaactactgattgagctgcattacagatagaatgggaaaagagaaaatggacagaggaagtacaaacaacttacttgaggaacacctcaatagagagaagaagagtaacagggaaatatttggtggaggagacttccaagatattttcacgttctcatctttgttcctaaccactttattcatatttatttattatattgcctcctttcattgaaagtattttatacgccatttctattacagattgtaaattccttgaagaaaaggtctgtgctttatataccccttatgtgtagtatatgtagcatcacacttagcatatcataatgtgcttgtttcatattcaaacaacaggaccattttcaaacaagtgattggattttagtgagagtatgaagagcagttttctttataaacatgggagacaaaagaggttgactcacttttaaggagaggacattgtagttataacaagtaacttctagctcattgggatgtaacatgctgaaaaagttttctaaggtattttacagctaacttgataatcttttggaaatcatctgttctccatgagtaaaatagaaaaaggcacaatgatatattgaaataattaagagtatctaatattgtgatgaagtgtgcaccaaaagctttcttaaatgtagaagtgtacatgacacctctttaagcagtatctacaaaaaaccagctggaactctccctattccttaggaattcaataaatcagactgttggcagattttccatcatgtatatgtgtaaattaatagcttttttttggcagtagagagaagagagtaatctaaatgtgtaggaagaagaggccatgagagtttcacatccagtcaagataggacaaaaaaaaatctacttgcattcctatgttaaatttttaaagatcaattaaatggagacttgtttggtggaggttgcagtatatgaagagctttaatagagatgaggggagaacagcaaatccagagaatcatacccagggcacaaatgtaatacacgtaggctttttctgtagattgcttcaagagcctggcttggcttgtctgagttactcagagaggaaaaaatgaaagtgagtgtatatgttggtttggggtgtgtgaaggtgtgggaatggagagaagtggacagagggaaaatgtgttgaaataaaacaccaggagctcatggaaaatgcaaaacagaaacaaaaccaagaaaaaatctttgaggggcatacctgtgtatgaattcatttttccatagcacctttaacatagtcaaaacaaataaaatttaagcagttattcagtcaaactagtagcaggtgcacacacacattccaaacattacaaatatttgtgggccacccacctggttaatttctgccaaagcaactatccctgaataatttcctcaagtacttattcatattgtttgtataaacgtcactcaatagagaatatttaataaactggagcatttataattatataaaaattcatgtcagtaaacaaggccactctgaaaagttatgtgaagaatcacagtatgacacattttgttagaaaacggtgccttttctttattgcttagagttgtaacatcacatagttcatgttgttgttttcattttcggggtatcaattagttgatcaatcagttagtgtttattaagcttctgtccagcaggtaaagcatgctcatcaaatttgcaaatgacataaatgttagagggatggtaaaggcactgcatgacagacatagcatccaaaaagattttgacagctcggagcaataggctgaatctaacaagatgaaatataacatagataaatataaatgcctacctttgggtccacaaagccaactgtacatgtatagcattgagtagatgtgaattagctgttgatgtaagcaggaaaaaaaagacagtattttagttaatagtcagctcaacttaatttatcagttttagctgcatgatgtcattgccaaaaatctagcctgcaattttgaattgtattaaggtgacaatcctgtaccagtttgacaggtcagaccacatctagagattgtagtatttctggagccacattttaagaagagagacactaaaaactatgtcatatttagaacatcacagaaactaaacacatttatcctgaagaagacttaggagaggaatgacatccttctttacatttatgtaagctctcacatggaaaagggattaaatttgtttggtgcagtctcaataattagaactggaacttgtgaactgaagttataaggagatacctttgggttcaatcatttataataattacatataatagtaaaagctgttcagagagaaaggcgttcccaaaatctgcagaggcagaatactagcacagtttagcctgagtgtcctcctttgcaaagtggggacaacaccattgtgaagcagcgatctgggaaggcagtgggatgatatagggaaaatgttcagcacaatgaggggcatgtagtaagtaagtggttatagtacacaggggatgtcacctttcctattgtgggaggtggtgacaccaatcctgaatcatcactgggtagaggtatagaagagatgctaaatggatggatttgacaaactgactgttacttcaaaaccctaactgactgcaacttattaattaaatttgccatttaaaactgtctctgaaaccaccagtcacgcttctatagcaccttgagtatttttttttttttttttttttttttgagacagagtctggctctgttccccaagctggagtgcagtggcgcgatctcggctcaccacaacctccgcctcccgggtttagcaactctctgcttcagcctcccgagtagcccggattacaggctcgtgccaccatacccagctaatttttgtatttttagcagggacagggtttcaccatcttggccaggctggttttgaactctttacctctttacctacctcgtgatccacttacctctgcctcccaaactgctaggaatacaggcgtgagccaccgcaccaagctattctttttttcttttttttctttttttggatagagtctcactctgtcgcccaggctggagtgcagtggcgtgatgtcggctcaccgcaacctccacctccccggttcaagtaattatcctgcctcagcctcccaagtagctgtaattacaggaatgcaccaccacaactggctaatttttttgtatttttagtagagacggagtttcgccatgttggccaggctggtctagaacttttcacctcaagtgatccgcccacctcggcctcccaaagtgctgggattacaggcacgcgccattgtgcctggccaaatttttgttttcaatcctctgtgcttatttttaattatctttaaaatggagaaaaaggtaaacctgccttaggtaactgtaaagttaaaaagaatgaatatgcataaatattttagaacaatgtctgacatactttttttttttttttttttttggcagagtctcactctgtcacccaggctgtagtgcaatggcgccatcttggctcactgcaacctctgcctcccgggttcaaaagattctcccgcctcagcctcccgagtagctgggactacaggtgtgtgccaccacacccagctaatttttgtatatatatatattttttaagtacagacggggtttcactatgttggccaggctggtctcaaactcctgacctcatgatctgcctgcctcagcctcccaaagttctaggattagaggtgtgagcctccatgcccggcccatactagctttttaatatatgttaactacttttgtaatgccaaagtaggtggcaaaggattattggagaagagaggacttgagatgtgtgttttgaaaaatactaaaaatttagttaagtgcctatatggaaatagcttgaacacatcatgagattaagtggtgtgtgatcgtcagacagtgaggagactttaccagttagattggaggtcggctgttggtgaaggttagaaataaattgggtgagatgagtgaggaaaaatctcagaaggccttaggtttaggatggtaagcaataggatgggatgtgtggggattccacgtgttcgtaggtaggggaatacaacatacatgtgatttttaaaataaacttatagagttttcaggatacattgccttactttagcttaaaaattatggatggaatagtggaatctttttatgcaaatccttctttcacttagaaatagaaatttctatttcagggcaatttctatttcagaaagtccaagacttttctcctccataaagttttctcttctgattcatattacagtggttttctttttgtttgaatttcttagcattcaaaatgatgttccttatatttgtatcatccatcatgatcttttaaggggaaatttaaatttaagatacgttgtcaaatcgcttaatgttaatctattagaaaggtgttattctgaatgcataaaatggttttgctttaaatgaggccctccaaattaataaaactgctcttcctgggaagcttctaagttggttctgggaaagcaagtcacacagagaaggtccaaaaatacgttatacaccacatatattaacaaattaagacataatttctcaaagcaactccttggaaaagataatccttcttgactgcattaagattcagtatttaagttagaaacaaccatcatcatttatagtgattcaaacactatctagcatattaaaatgtattttgttgtcatcatacatacaagctccttgagagaaaggatcatgacttaactcttgttggtgtagctcatagggccactgtgggtaccgagttgatgctttatgaattcagtttaaattagaagaatgtaggcaatgggattaccatttgtccagtaacaaattcagcacaggtattctgtctctctatttcccagcctgagtcagcagtttcttttagttctgatggccagcaggagtaaaatagcagcaaagatctggcatttcagtggcacaggtgattgtggaaaattactataatctaggtggactcgattctattttccccttgctaggtactgagatattgtgtaactttctggacttttgaattatacttctcactaatctagcatgagaatgggtggatagtgtcaagaattctacttaaaaaaaaaaaaatctagtgtactcttgtactcaaagggatgagtacaatctatcacagggacacaaatgtgaccaaaaaagtggttaaaataaaatatgaaactgaagagaatgaagatttgagcatgaccttctctgtatcttctttccaaagtgttttcggatctcttatgaaggggatttaaaggcttttctacaactgctactgcttttgtcaattcattcattcaagacacaccaataaacatgcacgagctcctcttgtcctcatagggctagagaatgagataggtgcaaagtttattttagcagaaggctttcttttcacaaatcagaaattccattgtatgtattcccttaaataactggcaaggggaccatcggaatgagctatggcaaaaatccacctcagtctttacagcttcagggtgatggggccccagatcagaattgtaaaatagtttagagaatcttggaacataaaacatggtgcagaaaaaccaaggaagatttaatcttatgtatggaaaggtggttggtagtggagggggcaatggaagagagtggcttgggatcatcattaatcattatttaagtacctataaagtgaaaatatccttctggaattcactgcaagtgacactgaattcttctactaagcaaatatgtgatgagttgataaaaaagaaggtcctgaactcttgacaacagatataatacagtgaatacagaaaatcaaaaacatgctttctatctgactcaaaataaaggtgcacttaaacttgtaaaagacaacatttttatttgaatgatatgacagaagtgtcacgggagtgttacctgctataaagaaagcctaagaattattacctttattagaccagtgacactgagctttagccatacatttctaacttctgtccctctacagagacaattttcttttcttaaataaactgtcatgctagtgttaatatattgttggctctctcatgctctgagaatactgctgatataaaacatgtatatgttagattggtaatagtatctttagtgtagctgactagaacaaatgtgtttccctcatggctgtgctaatgtgataaaggaaaattggctgttcatcagcttttggctgggtaaagacagtagagatggaaccacattcttttttatgcattaataccactgagaacttttcactagttatatttcatgtgcctgcatgttgtgcaaagatgttgtaaaacatgagataatgctacaaataacaaagtagaaaagcctgtatcttttataatgataacagtcaaacaccaaatgacagtaacaggctgtaaaaaatgggatgcaaaaaaaatgcagccctactacccaacaaagcggaatatatccaggcccttgaggacttggtatatgatttgaggtatattaaagctttgttttaaaattaaatcaaatgcaacactagatcaatggatttaagaaagaacatagtttaaatgaaagtagggtggttagaatggagaaaagccattgtgggtaacttcttgaaataatccgtattaccaagtaattattgtagtaacttcctgttttttttgttttgttgtgttttgcttgtttttttggggggggacattgaaaaagatttttaaggcaatagtacacatgattttaagatgtttgagaataaatgtttatcttcattaattattgcaagtctttttaacataaaagcattaaaagtataaccagtttcaggctcacagcaaaactgagtggaaatttcagagatctcccaaacatgctgtacccccatgtacccacagcctccccctctattaaagccctgcaccagagtggtatatttgttacaattgccggacctacactgatacatcattaccactcaaagtccatagcagaatagcatgttgaatgttttgctatcattttaattaaaatgttaacatccaacctttcctttgcatgaccttaaatctcactctttcctcccctctctcaacccctcccctttccagagccttttatttgccatttcagctccttcactaattagagtaccaattattcctttttcatttaagctaaaagcacttgaacaaaaagactatttgcagagatgaagttgatgtccaaacagctgattagtttatttagaagtgtatgcaattaaaaattttgtgcaggtatctatgggtgttttccataaaagtttgatagcattggctattctgggctccagtcgcataaacaaaaatcccatagctttttaatcatgtaatccaagagttatcaagctacaacctgtgggtcaaattggctggccacctgtttttataaataaagttttatttggacacagccatgcccatttgtttatatattgtctgtggatgcttttgcattacagcattagagttgggcagttgtgacagtaaccatttggcccataaaaccaaaccatttgacttgcagagaaaaaaacattctctagctatttacagaaaaaaaaaattgctaatccctaatatgtgcagttattaggctacttgcttgattgattagtctagaatatgattggcaactttttgttaccctacattggaaaagtatatctgaaaatcaccaaccggataccaatacccaagacagtaaattcaagaaatatttgatcctagtaacttgaattatatccacatgcaattctttgttgttatatctggttttaattatttctttcccttgtactcattttgctctatttccaaatatagccataacaaatttaatttgtatttaaagaagtaacatatcctcaaaaaccctgtaaaacatggcaaccagagctgttacatgtatgggacaaactattatgtatacctgtgaacaccctgggagatatcatcacagcacaaaatgacactatataggtttatatctagataaacacatggagatatcactgagctattaaaataatgttttcagtcttcccagctgaacaaagtaaagaagaaagaaagttacttaataaaaactgctgaaatgtgtttaatataaaataaaagtttatgcacttaaactaataatggtggtaatttcttacaggtgcatcagacaaaaatcagcttctttatcaatggcgtggagaaggatcatacacctttcaatgcaagaactctaagtggttcaattacagattttgcatctggtactgtgcaaataggacagagtttaaatggtaagtttctgacttcagaatgttatttatttcatccaattacattgttcttaaaaatgcatcaaacaaataatattttaaaatatctacgtgtattcatcttctagggctactgaacaaattaccaccaactggatggcagattaatgaaagtaaaatttattttttcacagttttggaagctggaagtcagaaattaagggttcagtggtgttggttccttctggaggctctgagggcaaatctattccatgtctctcttcgtggtagctactggcaatccttagtgttcctttacttgctgcttcctaactgcaatcttgcctcagtcttcatgtggccttctcctctgaatcttctcccctttacctctgttataaggacacttgtcattggatttagggcccactcacagtcaggaggatctcaccctgagttccttaacttaattatacttgcaaagaccctttttccaaattaaagtcatagttacaggttccagatggataatagatcttttgggatctactatataacttactacatttgggaagctttcaaatataaacttctttattctgatcagtttttaagtaatttcaatgtgtaataaactatatttcctttctgtctcttttctgaggggtttgcattttcatgtagagaattgttaaagtagaactacgaagtattagatggaacctgagaaatagtattgacatgtaattaactggactgatgtttacatttactacattaaaaatgggccatatagtttaagaagatatcatatactatatattgaataaaaccagaagttgaaataagaaattatcttgaaatatctagtacagtggtctttaaaatgcctgcatattaaaataaaaatagtattttatattattatataatatatgctcattataaaaaaatctaaacaatatggaactctgtgaaatagaaagtattttccatatttctatcttcagagatagatataatttaacttttttatactcctacagatttttagtacatttttagctagagatatagttataaatacatttttccaaaaataaaattacaatacatatgcttcctctgagccttctaaaaataaatacttctccttcaaatgttataaacaacgtttcatgtcaatgtatcttctcatttagatatatgttctcatttaaaatggctgtattctatgcaattgtatagttgcaatccatgagatttcttaagctcctataatgaacatttaggtttttttaatgtttcagtgcaattagcagttattttatggaaaatattatatatatatccacatatatttatatatctgtgtctatatctacatttccatttatatatatcaaccatcaatctatcaatcatatacatagatgtatacatacgtacatatgtatttgagcagttgcctgattgcacagttccttaatatcctatttggtgccaacctgcgtgaattcatatcccatttcctcacttactagctatatggcctggcaagatattttaatatctctaaagtgtagtcaccccaactttaaaatgatgatgatgatgatcataatattgatttcccatagggccaatgtaaggatcaaatgaagcaatgtcatgtaaaacattactgtgtttcaagcacctggcatgtattagatattcaatatttatttgttaaatgaatgaatggatgaagtgctaagcacaatgcctgtatataaactatattttctctttcttgggcatggggctggattttaatgtacagcattgttaaagtaggactgtacagtattagatgaaaactgagaaataatattaacatataattaactggactatgtggtttatattttcgcacactaaaaattggccatgtagtttaagaagataacatatatgctatatattgaaaaaaattactaaactatatcagtaaataataataatattattattttattattatttttttttgacagggagtttcgctcttgtcgcccaggctggagtgcagtggtgcaatctcggctctctgcaacctctgtctcctgggttcaagtgattctcctgcctcagcctcctgagtagctgggattacagatgtgcaccaccacgcctaacttttgtatttttagtagagatggggtttcaccatgttggccaggctggtctcgaactcctggcctcaggtgatccacccaccttggcctctcaaagtgctgggattacaggcgtgagccaccgcaccctgccgtaaataatactattattaatgttattataattatttccaaaaaataaattcatagaagttgaatggctgggttgaagtatatggtcattttatattttaatacatattacagagattgctctaatgcataacaatgggctacctccagaaaggttgtgaaaatttataacctcattaaaatatatagccaagtacttgtttccttaaacactaactatccttacaaattatccacttttttttcacccttgacattcctctaagtgaaaaatattgttgaatgctgactcagaattatttggccattaatgagtttgagtagctttttacgtatgtcttgatcatttgcatttcatttatgaattccttattcatacaatgtgtccatatttatactctataattccttatttatttataaaaactcatttatgttaagaatattatgttgtataagttttcttcagttttttgatggcttatgaactttgtggtctagatattttaaagtaatcctttaatatttaagcaaaataaaacatgtatgcaagatagtgcataaatataaaaggtatagcttgatgagtttttaatatttatatacacctgtgtaactctcatttaaaaaaagtcgtagaatatttccagaatctcagagtcccctaatgaacatccactgtaaagataaaaacagaatagcatcaatgtagccctctataaccatagattaatgttgcctgttctcaaactatcatacaaataaaatcatgaagtaggtactcttttgtgttctttttgcttagcactatgccaatgagatttttccatagtgtatgcagttatatctttagctttagcaaataattctgtaaagttttccaaagtgggtgtcccaacaagcaacatttgaggatttcagttgttccacatccttatcaactgttagttttgccagatgttatcattctttgccattcttgtagccatgtagtgcatttcctgatcattagtgatactgagatcttttcatgtgcttatttgccaaatgaatatgcttttttgggaagccttttgccaagttttaattggacagtttgtatttttcttaataatttataggaggtcttccatattttgaatatgagttctttgacaaatacatgatagcaaatatggtcttctgggctaaggcttacagtcacattctcttgatggtatttgtcgataagcagatcttcttaattttaatgagtctaatttagtcattgttttatacttaatactttttgtgttctgtttagactatttttgcaaaccctgatatcacgaagatatcctcctacagtttattcaggaagctttattattttacttttcaaattttggtctatgttctatctggaatagattttttgaggttatataaggtaggggtcaaaatttttgtcccacctgaatgtgtaattaacctagaaaaccttgcctcttgaaacaaatcaatgtttctaccattctgcagtggtaacgttgtcgtgaatcaggtctctgtatatgtgaagatgggtttctttctgaactttctattctgccccagtgatctgtctgtctgtctatacttgggccaaaatatttagttttaattactgtaacttcatacatgtcttcatatctagtagttctccaactttttttcttttaagattgccttggctattatatatgaattttagaaacagtttttcaattttcataaaaaattctgttgagatttaaattactcatttgtatttaggagaatgggcatctgaacaatatcaagtatccagcccataaatgtaatatattccttgatttctcccagcaatgtttttagttgtctgtatagaggtctcactcctatttgttagacttgttcaaacatattcattggttttccttcttaatagactatttttttagagcaattttagagtcacagaaaaattgagtggaaagtatagagagttccagtatactctctgctcctacacacgcacagccttccccattgtcaatatccctcaccagagcggtatatggtatatttgttacaattgatgaacctacattgacacatcattatcacccacagtccatagtttacattaaagttcactcttggtgttgtacaacgacaagtatccactactccagtatcctacagagtagcttcactccctaaaaatcttctatgttcctcatattcatccttatctctatcctaacccctagcaatcactgatcttttcactgtctctgtattttcaccttttctagaatatcatatagttgggataaaaaaatcatgtatcctcagattggcttgtttcactgagtaatatgcatgtaagatttctccatgtctttcatggcttggtggttcatatcttcttagtactaaataatattccatggttagatatagcatagttgatttattcattcacctactgaaggacatcttggttgcttccaagttttggcaattatgagtaaagttgctataaacatcagtgtgtaggtttttgtgtgaacataagttttcaacttataaataccaaagagcgcaattactggatcgtatggtaagatatgtttagttttgtaagaaactgtaaaattgtcttccaaaatgactatatcgttttacattcctatcagcaatgaaagagagtccctgttgccccacatcctcaccagcatttggtattgtcagtgttctggctttttggcctgttggttttcatgcaattatacttagtattgtttttgaacttcatttgctaattttgttactattgcattaaaatctaatcagtttttatatttacctatgtttagtgaccttgccaaactcattattatgataggtacacaatcctatcatttgcacatatcaggaactcaactctttttgaatgtttgtaataaatgtatataatggacatgccataaatatctcctgtagatatttttgtctgatgcacttattaattctgaaataatataaaatgttattttgtttttctgtatgacctgagttattagaccaatgtctagttttaaaaaagaaggtatatatttttgatattcaaaacactgtggttaaattgccaagctctggtttaaatataacccaggtgtgcttctttgatcaaaatattaactctctttaagtctggtttctaatctattaaatggtggtttaatatataattcataggaatcttataagaattatgtgagatgatgtatgtttagaatataagttgcttgttgtatagtaaatgtgcattaagtggtaactatttttaaactctttgaacatcaattttcttattgtgaaacaataagatagggataacactatatttccatatgattgttgtaccaatcaaaagagaaaatatgaagaccgtattactttagtttgtgtatgctcttagatcaagctaaactcatgtgaagaagcaatattttaaggaacttatatatttaggaacttggtttgagtaattagtataatgcataatcttataaaatactctgcgtgaagaatttttaaataacacattaaatcttgtgagccttatttcaatatttaatccccattagtacttctaaaagtgttttattgcaccaaatgttgctcaaagtatttgatagcgccataaattagtcccctatgcactgcagggttaaaatggcttgcttctattctacttcagtatactaaatgttggattaatgcttcaaaagaacagtgtgaactgaagatgatatttttaaactgtgtagaaataaatttcactcctgattagaaaacatgtaacaggaaaccggtttatttcaaatattatttagttttcattacaactttctcctttatgttcttgacatctgagagctacagaaggaaaaggatattttaaataatttttatctttattctatcaatttatatgtacagtcgtacctactgtatcttttctctaattagagatggcgtatagactggctcattacttctgcctaatgagccaggctccatgccacctctctaatcagaaaagagataggtacagaatgttcctatggacttattataaatcattttctttctcttacttgctcctttttttaatcaaaaaattaagtcactgtcctccatacttttgtccatatccaagatggtttctttcaaaagaggtaattgtgcaagcgattactgagctgaattaaaggtgctctcatgcagtgccaggccggctgtctctgctttggaacagacactgcctcaaacacaagcacatcaaatgaaggcctatagcagatcaagatggatcttttctgtctttctctgattaggtttgacttggttctctgtttctgcacccagaaagtaacaaccttccatatgagtgttggctactacagagctttttctttgagtcttatctctagcataactctctagaaaaatgtgttgccagtgacactttctgttactgcaggacttgtctttgctttccctggaaaagtaatcaatggaccaaatgcatgctttttactgaaccctcatttatccttattaatggtataatctgatttgatcaggctgaattttatgtatacaaatagaaacaccttagaccatctatatcaaccaaagtgtgatggctcctttttagaacattttcttttagttgtagatttattttagtgcttccaattgggtatataacctggagcacttgtgttagcagatatgtagttatgaggagtcagcaatgtcatcgtggtaataaaccatactagctctccaaattttggatttaaaattacagaactacatgaatcaaaacttttcccagttatttctgaacttgtttatcaacagagttctagttgccgattaaaggtgagaatttctacattatacattcaaatgtgcatagcactttcttaagaagatcattggtcattaaggaatcaataaatatttgttgagtgtctgttaaagtgaatatgcagggaagaaaaggatcatcgtctaaagctaactcctacttgccttcctttctgtgttttcaacgttgtgtgtcttagcccatatgcttgtacttgattctaaagttggaatgctacttctaatttctaccagtttcccatgggttcacatttctaacctctgctagatacacaaactccattttagttcagctgaaatcatgctaatttttttcagagagaattatttttgggaattagatttaaaaaaagcttagaaagtattgaaattgactaagagattggaatggaagaagagtataggaatatagtatatagataggagtttacttagtttcagaacattgcagacaaggtatctagcaatattatcagacaagttatgttgtatatttaaaatgatgttaatgtagctctctcaaccatactaagtaaaaactgctgattaattaaaatttgaatgcaaaatatgcaatcataaggtagtagaggaaaatgaaggcaagtgtttctataattctagcatattaaggacctttattagcacgataccatgtccagaaacactaaaggaaaatattgaaacatctgactattaaactgggaatttaaaattcaaacaacgattatcattttgtacttgatagtttggcaaggactagaaaagcgattataccggtgttggaaatagtttggggtaacctggcaaactatcaaaagtaaaaatgcgaaaactacttaatccaagatttctacttccaggacactatctcgagaatataattagacaaagacttaaatacatactcaaaatgttcattgtagaatgatttaaagtaacaaataactggaatcagttaaaaacttcaaaaaggaattgatttaataaattataattcatgcctactgtggaatagtatacaccatcaagaggaatgaaatatgtctctttctatgtacatggcaatgggttcatgatgtgttattacatgaaacaaacaagattgtatagtacaaaattctataaatttaatgtatatgttataaacatacatatacatattaaagttctggaaggaaatatgccaaaatgttcttcagaatgttagtaatgttaatctctatgagtgggattgcaaataattgctttttaaatttctttttgtgcaatttttttcagtaaactataattttataataagaattaaaaatattttccaattttggacaaaataataaatggaagcattttcagaatagatttattctatgaatgtaacaagttcagccagagacacctaatttgtatagtacagagggtggtcttgaaaatgttagtcatttaaattctgtacttgtcacatggattcaggaaacacaagcgttcattggacatttaactcattgtacatacaattattattactataataatttgtgcctgagaagcaaagcatgagatttagaatcagacagatttgggtttgaatgctagttctgcttcttaacagccaagtgactttggcaaagaatataacttctcaatccaatttcctaatatgttttctcatttataaaatgtgttttatacacatacttttcagggtgatcagagagcttataaataacacatgtttgattcatgttaggtattcaataaaatttcgctatcataaatattattgttaatttagttattaagtttattgactgtgatacttaaaattttaacataatggccatgaccatatttaattttttttggctgaaaatcaaaatttacttagggtgagggagaaaaaaagtccagtttagattcattatgtagcagatattttaaaattctgtgttttgtctatgtaaaccccacaaaataatttctctctctttttaaagatctgtcctttctagtgttcttcaatgtttcctgttcatcctcacttccacctgatgctatttcttcttaatccgaagaacctcccttttcattgcttgtagctcagcctgctgaagcaaattctctcagcttgtgtaaaaatgtctttacttttgcaggatattttcatttgatatagaattctacattgattactgttacttcttttagaactttaaagatgttgtttccttgtcttcttgccttcattgtttctggtgagatatcagccactatttatataaatgttttcttgtatactatatgtttctttccttctttctttctttctttctttctttctttctttctttctttctttctttctttctttctttctttctttttgaagcagagtctttcactctgtcaacccaggctggagtgcagtggtgcgatcttggctcactgcaacatctgcctcctgggttcaagtaattctcatgcctcagcctcccgagtagctgagattacaggtgtatgccaccatgccaatttttgtattttcagtagagaccgtgtttcaccatgttggccaggctggtctcgaactcctgacctcagatgatccaccctcctcagcctcccaaagtgctgggattacaagtgtgagccaccatgcctggcctatatattgttttccacttgatgctgttaagattttatttttatctttcatgttatcagtttatgatatgcctaggaatgattttcattatatttgtcctgcttgaggtttgcttaaattcttggatatgtacgttggtgttttcattacatttggaagttctgatagttgtatcttcaaacttttctttctttttttcctttttttgcttccttttctttcttctgtaataagactctagttagattgatgttagagcactagatattgtcccatagatattgggtacagttttgtttgttcctttgttttcattttccccactcttttttgtgtttcagtttggatactttctatttgacttgtctttatttcactggtcaatttctcttttgtgtctaggctgctgctaagcccatctagcaaactgttgatttctaaattatacttttcatttcaagtattttcatttggccgttttgtagacttcatctattggctcaaattcacccatctatttgcatgtattattcactatcacccctagatcttttagcatttatattataggtattttcaaatccctatttgataattccaacatctgggccatgtctgcatctccttctattgactctttcctctctttacaaagggccacattgtgttgatttctcatgtgtcttaaatatttttattgtatgataaacactttgcgtaaaagaatgaaagaggtggaagtaaatcatattttttggcgtttttccctttacaaagaagagcactgctggttctatgagaccttttgaatgggggtgggcagtaggaaagaaaaaataccaaactgacttgaagttgatctgtacgtgggctttactacagttttaatattatttagctcactactggtttcagatatctgtggatagaattgaaaatagttagacacatgtctggtggggcctccttagaattctaatatgtcattctggcctctgtatggctgcttctttcttactccttctatgcctgaatcctctatttcttacctctgagctaagtatgggagtagccctgggtctcgtccaatgagttacatgtccagtaaatgtttgtgtttcctacaaaaggcttattactttctagaatttaattcatttagttttttctgtgcgctctacattttgattggttaaaaaataatgactttagggcttatctggcttgttttggttgttagattgacagcaaagtgatggtcccttacaactttttacatttaaagcagatgttgaactattataacaacatctaatttatacccctttttttctttggcacaactctgtctatacttaactctccaaccctctagattgtttcagctatggctggtcactgactctgaacaaaaaaggtgcatattacttggccccaaagattattttggtagaattcaggcatcgacgttttaattacctcctctaatttttcatggggattttcagcttttgtgggccctaatttatccctgactcttaacttttatatctgtttctttggtttgcctgaaatctgtttactgctaatatttaaaactgaaacatgtttttttataaatctagccattggatcttgtttcactaatgatcatgtggcatcgtttaatctcggtgcccccagcggctctgtttgttcagtttgtatagcacatgcatctcttgtgtttctttttctgtcagatacataatcatattgattagtgtataccccttataccctgagtccaaaaattcctcatccctcccgggatcttcaaatgatttaacgactttccactatctctcactttttgatgtggtctgttccctccttactcaacttaagtttcatggccagttattataaccacttcttttcatggaactggacttccctgccgttttttcttcacttctactatgatcttggcactaccacagcataggttaaatatacccaaagaggacgactcttcccaccttaaactcatgaccatgaacttcctatgtttcctgatgctgccctgtgatcattccatatttccctcattcattcactttcctgtcttatgccaactatttatacattttcctttctcattatcctgatcctcagtgattatattacctccaactttaccataaaaattaacaaaaagaataaaagagcttctatagatttccactgctatatttatccaccactggcataccacctattaatagatctgaccaagaatatcttgcctcatttttccccaatttactgctgtattgtaaaattttcttgtattaatggaacattttcaagggaataaaggcatgttgttatttttccatgaaaaattattcttgaccctcccccatttcttctactagccattgtcttatttatttgctctccttttagcaaaacttcaccaaagtatattcaaccataggagcctttaattcctcttttcaaattccaccatctacagtcagactttagctcaccactgcacttaagctacacttgtcaaatctctactcaccttcacattataaatctaatagttaatttcaagtctttatctttttgacctattaacatcatttaatggagttgatcgctccttcctccttggtatacgttcttcacttggcatctaacactccatcatctctctgagtttctagttgctgcgtctcagtttgatttactggttcctcttcatctacttgacctcttagtattggtaccccaagccttaagacttagctctgctcccgtgtctacagacactcactcccttaaagatcacctccagtcttatagctttaaatgtcatctaagtgacttgacctccaaatataaatctccccaccccagcctctttcctgaactccagacgactctgttacatgtatcaaactacccaaagtctccatttgaatgtttaatttacatttcaaaattaaacttactttttttcaaaatggaactggttttcttaagctctctcactttgatccatatactacttcttccatggtcttcctcatcacaagtgaaggcaatttcatttttccactaagacagagaaaaagatttggagtcatccttgtcaattctctttatctcatgttcaacatttttttttttgttttgcaaaatcttgttggtgttagaatcaaaatatatccagattttgaatccttcttagcacttccactagaatcatcccagtccaattcatggttgctgctttgccgggattactgcattgtcttttaactacttccaggcactccgctttattctcaacacagcagccataattgttctgttaaatatcagtcaagcatattacttctctgctcaaaatgctctattgtttctccattttaccagagtgaaaaccaccattcttactataacctacaagacctaactgagctaacagcagttacttctctggctttatttcttacatttgtttattttgttctccttgttttacacaaattggcctctttgccgatttttgactatgggaggtgcacttctgccttgataccattcgctgttctttcaacctggaacttttcacctcctgatatccatcaggctgactcccttacctgattaggtctgctcaataccagtttcttaaatacatctttcttatcaccccgtttacatctgcaaacaccacctccccactttgggtctcattatgttgctctattcttttccatagcacttagcatctttaatgtattatagaattgacttatttttgttgaatatatctgtttttccctctataatataaaagagaaagcaagattttttttatttgcattactcactgatataccccaggatccagaagattgcctatcacatggtagctactcaatacatattttccaagtaaatgaatcgatgggcagcttccatgcagcattaagcctgtgggtgtgtggaatgcaagaattgaagcttgggagcctctgcctagatttcagaggatgtacagaaaagcctgggtgtccaggcagtggcctgctgcaggggcataaccctcatggccctagaacctctattagggcagcgaaaaggggaaatgtggtgttgcagtctccactgagtcccctctaggacattgccttgtggaactgtgagaagagggccaccatactccagaacccagaatggtagccactggcagctttcaccctcagcaaggaaaaactgcaggcactcagtgccagcatatgagagcagccactggagctaagccctgcaaagtcagaggggtagagcttcccaaggccttgggagctcactcctcccaccaatgtgccctggatatgagacgtggagtcaaaggagattattttggagcactaaaatttgatgactgcccttttgggtttcagacttgcatgggggctgtagcctcttttgtttggctgatttatcccgtttggaatggaaatatttactcaatgcttgtatctgaattatactttggaggtaaataactgggttttgattttacaggctcataggtagaagggaattgccttgtctcagatgagactttggactttggagttaatgctggaatgagttaagactttgggagactgttgggaagggataattgtattttgcaacatgaaaatgacatgaaatttgggaggggccagaggcagaatgacatggtttggatctgtgtccccatgcatgttcagttgtaatccccagggtggaggtgatacctggtgggagatgattggattctggaggtggatttttcatgaatgatttattgtgatagtgaatgagttatcacaagatctggttattttaaagtgtgtggcacctcctcccactttgctcctgctttccacatgtgatgtacctgcttctccttcaccttctgccattattgtgggcttcctgaggcctctccagaagccaaacagatattagcactatccttcctgtaaagcatgcagaactatgagtcaactaaccctcttttctttctaaattacccagcctcaggtatttctttatagcaaagcaagaatagactaatacattatcctttgttactgatgtctaaaaatcttttttaaaaaaattaaaagcaagtatattaagacagtaaaggaataaaaaatggctactccataggcagagcagccccaaggactgctggttgcccatttttatggttttttcttgattatatgctgaataaggggtgggttgtttgttagttttccctgaaaggggtgggcaattcccagaattgaggatccctccctgttttaggccatatacggtaacttcctgatgttgacatggcatttgtaaactgtcatggtactgatgggagagtatcagtgaggacaaccagaggtcactcttattgccgtattggttttcgtgggttttagctggcttctttactgcaatctgttttatcagcaaggtctttatgacctgtgtcttgagccaacctcctatctcatcctgtgacttaggatgacttaccctcttgagaatgcagcccagtaggcctcagccttattttacggagcccctattcaagatggagttgctctggttcaaaagcccctgacaattaccccctcctttttaaaagaaagctcttaatcttaagagttgtagagggatgaagatccatcttctctaacttcttcaagctgaataggggtgatgatattcctgcctaacaattagggtctcttgtctttgggatagagaggaactcaatcagaaaatgctggtatgtcaaggtccattcagaatacttgagttctgacaaaagttgatacctggaagattaataagtatttaatttaagaaaacattcggtaagcttatcctacacaaagagtataacagcaatacattccgcagcagtaaagcaaaataaataaaattatcacaactaaactaaattagaagactttccatgaactgggcaattgttagaaccaagctaatatgtggttgctagtaaatcccagtatgtgcccagaattagaatattgatccagattttgacattgcccattcattttggttttttttgaatagtagtcagagatcacttggtggtacacagaaataagcagagtctgtctaaattacagaaaaaaaaccttaaacacaactaatgagactagaatctaataacaggtgtaccatagtttttgaagcaattctttttcttttcagtctctcatttttactaaagacaaattataatagaatcgatttgtgcgcaaaaatgagctttagtcttatacttggcctgattacttgtataaaatgctaaaaaataactatttttcacataggattttaaaattggctttgatggaactttgttccataaaaaggaatctcagataagacctttttaaagctgagcccagccctgggtttgtacaatcaaatacctatgagttgggttaattcctttactcttgaggtcctaagatatcttcgggcccctgagtctatcagaaagtgacattctttacttatcacaggtcaggaaccctgtacagggcatgtgtaaacaaagaatgtgaccagttttcccaaggggtttttattggctttataagtcaagattgattccttaaaggaaagcacaccattccagtgaaagtcttggtaaaataacaaatttttccaattgtgtcctgttacaaaataaaacagatgcttattgcacttatgcaaatatctattgtcataagttaagaatactcacaaatagtttctaaattctgaagaaattaggtagaatcaaatatgccccaaattttgtttacaggagtaaaatttactcaattgttaaaaagctgtaaatagcttaaaagaaaagttgccttggctctgatagcaaaacaaaggatcagcaacattttaagcaaaaagttttaaaagattacttcagctatctattattcagcccatgcagttaactcttgttcagcttgatattcatgaacatttcagctctccatcagtactgaaagttttatcctctcttctaatgtcacaatcttcaaagttattagaaacgtgcattcaagagcacctgtcaaaatcctatagctgactctaaacttactttttaaagaggattaaaacaggtcaacaattttctatggatgacaaaaagttttagaacgacatatattaaagccacaattgataaagaaattttggttagttctgtgacatacaatgattttactgacaattataactattactgataatgtacactaagtcatatcagaattacaggactttcccataattttggaacacaaaccaataacatatttttacaaatacagtccaaagaaagcaaagaccatttcatatttttctatgcttcctgtatgatatttataccaaataacctgaatatgccattttggactttaggccacctaatagctaagagattaattaggtcagaagaagacatactttgtaattttattttggaaagcttgtcaaatattaaaggtttaaaacactggatatcacaaaatataattccaggtcatcataagtcattcattaggccaaaataataactcaaaaatatttaaaggggaaaaacctttactcattaatagagggaagacttagatctccaaaccatctgtctcttttctttcctttcctatataaaatttcttttttagaaacaacctctttgcatagttgggaatatggctaattccacatgtccccaggccttatctagaatctaaagtctccaaagtaggtaaattgaacaattttcaaaagtcaaagaagcagtttctgaccttaaagcatttagtaaacttaatatgtgacctgcctaatttagaccaaatgtctttattttatcaataatttttaaagctgtttttatttcccaaacattcctaaagtcacatgaactaaaagtgattacactttttacttttctgacaaaatatttgatttagacacttattatttttaaaccgattaatcaaagctcttttatatcacatatgcagcacatataaatacacagacagaaaaagatccagtaagatttttcatttttcggtttcttaactggattactggcttcagggtggagccttagaggaacagagccaagaatgcgtgaaatttctaaagcctaataagcaggcacagctggaaggcaaactagatcttcaggaattaagggttccattttaatagcagattctggatcccaaaaagagggaattagcccatctcccatgggagtcttacctctcagtggggagtgggggcatttccataacttctaagtgaccaagagcatgcttctctgatccaaatgtgcaaagagccaagtattccataactgccattagccattctcaaaagtgtatttcctacctagttattgcataccaaagctctttcctaatgtaaagtgatttctgatacccccaaaagtaaaaaacatcagataacgcaatgcgaaacacaagacagccttagattttgagagggatctatccatttccaattcctgggatttcatgaggaaaacagatgttttttctcaaaatggggtctgtggtgctcctttttttcccaaggagtcccaggctgttagaacttaaatatctgcttttaattaagctgacttttaatggtactgctgtttttaaaaagtcctcttaaatttcttattacctgactttagccaggcgaaactgtcaataattctggcttttgaactttatcaaaggtaacctcccaggtgttcagagaaaggaaaattcaagacagaccattgaggggaagagaatcaacaaatgttcatgcgcatatcaaaccagaaaggactcattccctaagctgggaattgaaccctgaacctgggtcaccattgtgaaaagaaagcctcagctactgagctactcactgggcagtttccattgctcttcccagaaggagtctagagcagcagattttgagcttgcaaaggttttaaatgctcaagataattttgtagagctaactatgacatgaacccccaaattcctgttttctggatggtagagacctagagaaagtaccgccatgtggtcacaaggtcaagctcccaaggacataactagccagtttgctgggccgtcttgaacagtaggcttatggggtcctaagcttgtgttctatcctaaggtacccctctttctaacagaaatatacaggaagacaaattcacagtgcaaagtacaacagattcactgtagcttaaaactagcctcacaaatcctttttcacattaatcagaactttacagaggagataaacagtgatttttaccattctttgaactagtttgcacagagagaaagagagaggacagaagtctcactggtaagaaattcttacccttttgctggcatgccaggcttctgggttccctttccctgagcagtcctagtgacccagcttgacgcatcatagccctgggggccaagctgcaacacaaaggaaaattgtctttttttctgtcctggccagagcaaaatatgtgtgacatagacattagccactctgctcagcatccaatatcaaactaacaaggctcaaatttgcccctggttggaccctgtcatcattaatccaacctctgaccagaagtttcaacatgtggtctctgggcaagatggtcaccctgagtaagagaaaaggtaagaaagggaaaggagagaaagaaagaaaagcattggctgcatacagcagggtggggaaggcaaaataatcaaggataccagagaaagaccctcccattgcgcaaaagttcaggctgccgcttgaagggatctgtcatgaagggatcttttccagtagtcccattagctctcaaacatcccccttttgggaggaaaaagctccccaagtcccacattcacatgcatgcctaattatgtcacccacagccatcagcaaagagggcaaggcagattaacccaacgagaatagcagttaatatctcgtattgccaaacccattattagctgagagggactttactgagaggggcctgaaaccccctaaatcttaggaaggactctaaccttcttaagttgggccttgaatccatgttctgtcaagtgtccttgtcttttattaagaggggcctttaaccacctctgtcttaagagagactctaacgcccctaaattaggcctctaacccatttccatcctttacccaagcaaatgtaccccacttacccagagtcagccaataagtgctgaagtctatttcctttgggtcaggggagtctcctccgtgttgtcccttccatggttcaccagaaagatgttaccagaaagaggtccagatccagaccccaagagatacattaaaacaaagcaagttttccttttgaacttgtcaaaaattccatcttgtaaaggatattaaatgttgctttaagctgaaccttgagcaaattaggtggtttgtgtgaccatacatgtatgtggtggcttcttgtttgcaacttcaaggaacaagtattaatagttcagtgtatgatgttgatttgagttgagcatttgcagtttggataatcttaaattttgacagacactagctgtggagactctttctgttactaaatccttttgttttgaagctattgccattcgtctttctcttgtcctttatattttttgtctgtttctttaagcttttattggaaatgtgcataagtaaagaattacttgtgttacttgccaagcaatgcacatttcatagttttaaatctgtaatcagcaataaaaatcctaaaatatgtatctaagaacatcttaaaaaattctttctcactcaagaaagaattcaaggtgagtccatagagtaaagtgaaaccaagtttattaagaaagtaaaggaataaagaatggctactccgtgtagagcagcacccccaatgtctaaaaatcttaacaatgataataaaagcagaaaacatatggtaattttttggcataaaacccttactgcagtgagcattaaaaacaaataaactgctttggttcttcattctagagacatcatatttaaaaacttagatttcattatttgattttcattttgttacaaaataaaatattcttagtgtcacactaaacagagatcagataattaacctgaccccatgatgcataattttaattttaatttcaatttgagttcttaatagaaataatgaaaggctgttatcatattttggttgaatggacacagatctatttttttatggtaccacattgagaatttgtttttttacatatataaatctattaatggtattgtcaaaatactgtcttttttttttttttttaagatgtagtattgctttgtcgcccaggctggagtgcagtggcatgatcgtatcctagtgcagtctcaagtaatcctcctgtcatagcctactgcatagctgggagtacaggtgcacaccaccatgcctggctaatttttttttttttttttttgtagagatggttcttactatgttgtccagtccagtttgaagcaatcctcctacctcagccacccaaagcataggcatgaaccatcaagcccagctagtcttttaagctttgttgttttgaaaataatgaggattattactttgatatcatattagaattttttctaaaaatttaacaagaaattatctttagttctgtataatctgtgggcagctatatctatttataagcatctatgccaattattactttacttctagttgtaatttaaatttgttttagttttcaaggacacagctagtcttaataacttgatttgtttttatttccatttattgagtttagcatttataataacttaaaaaaaattttatttcactttaagttctgggatacttgtgcataacgtgaaagtttgttacataggtatatgcgtgccatggtgatttgctgcacctatcaacctgtcatctaggttttaagccccacatgccttaactgtttgtcctgatgctctctctcccctccccacacctgaaaggccctggtgtgtattgttcccctcccttcgtccatgtgttctcattgttcagctcccatttatgagtgagaacatgtggtgtttggttttctgtttctgtgttagtttgctaaggatgatggcttccagcttcatcagagtttctgcaaaagacatgatcttattcctttttatggctgcatagttttccttggtgtatatataccacattctctttatccagtctatcattgatgagaatttgggttggttccatgtctttgctattgtaaatagtgctgcagtaaacatatgtgtgcatgtgtctttctagtagaataatttatattcctttgggtatatgcccattaatgggattgctgggtcaaatagtatttctggttctgggtctttggggaatcaccacactgttttccataatggttcaactaatttacattcccaccaacagtgtaaaagtgttcctgtttctccacagtctcactagcgtgttgtttcttgactttttaataattgccactctgactgaaatgagatagtatctcatggttttgatttgcatttctctaatgatcagtgatgttaagctttttaaaaatgtttgttgactgcattaatgtcttcttttgagaagtgtctgttcatatcctttgcccactttttgatggggttgttttcttcttgtacatttgtttaagttccttgcagattctggatattagacctttgtcaggtggatgggttgcgaaaattttctcccattctgtaggttgcctactcaccctgatgatagtttcttctgttgtacaaaagctctttagtttaattagatcccatttggcaatttttgcttttgttgcaattgcttttggcatttttgacatgaaatctttgcctatgcctatgtcctgaatggtatcgcctaggttttcttctagggttttaatgattttgggttttgcaattaagtctttaatccatcttgagtcaatttttgtgtaaggtgtaaggaaaggttccagtttcagtattctgcataaggctagccagttttcccagcaccatttataaaatagggaatcttttccccattgcttgtttttgtacagcttgtcaaagatcagatggttgtagaagtgtggtgttatttctgaggtctctgacctgttccattggtctatatgtctgttttggtaccagtaccatgctgttttggttactgtagacttgtagtatagtttgaagacaggtagcatgatgcctccagctacgttctttttgcttaggattgtcttggctatatggactctttgttatttccatatgaaatttaaattagttttttctaattctgtgaagaaagtcaatggtagtttgatgggaataggactgaatctataaattactttgcgtggtgtggccattttcatgttattgattcttcctatccatgacgatggaatgtttttccatttgtttatttcttctcttatttccttgagcagtggtttgtagttctccttgaggagctccttcacgtcccttgttagctgtattcctaggtattttactctctttgtagcaattgtgaatgggagttcattcatgatttggttctctgcttgtctatttttggtgtatagaaatgcttgtgatctttgcacattgattttgtatcctgagactttgctgaagtcgtttatcagcttaaggaattttggggctgaaacaatggcgttttctaaatatagaatcatgtcgcctgcaaacagagacaatttgacttcctctcttcctgtttgaataccctttatttctttctcttgcctgattgccctggccagaacttccaatactatcttgaataggaatgatgaaagaagggatccttgtcttgtgccagttttcaaagggaatgcttccagcttttgcccattcagtataatattggctgtgggtttgtcataaatagctcttattattttgagatatgttccatcaatacctagtttattgagagttttaacaagaaggggtgttgaattttattgaagcccttttctacatctatcgagatgatcacgtgattttgtcattggttctgtttatgtgatagattacgtttattgattgtgtatgttgaaccacccttgcatcccagggatgaagccagcttggtcgtggtggataaggatatgctgctggatttggtttgtcagtattttattgaggattttcgtattagtgttcatcagggatgttggcctgaagttttccttcttttttttttttttgtcatgtctctgccaggttttttgtatcaggatgatgctggcctcataaaatgagttagggaggaattcctcgttttcaattttttggaatagtttcaaaaggaatggtaccagctcctctttgtacctctggtagaattcagctgtgaatctgtctagtcctgtgctttttttggttggtaggctattaattactgcctcaatttcagaactcattattcgtctattcagggattcgacttttcctggtttagccttgggaaggtttatgtgtccaggaatttatccatttcttctagattttctagtttatttgtgtagaggtatctatactattctctgatggtagtttgtatttctgtggggtcagtggtgttatcccctttgtcattttttatgtgtctatttgattcttctctcttttcttctttattagtctagctagcagtctattttgtttgtttgtttgtttgttttcaaaaaaaacagctcctggattcattgattttttgaagggtttttcgtgtctctctctccttcagttctgctctgatcttagttgtttcttgtcttttcctagatttttttatttgtttgctcttgcttctctagttcttttaattgtgacactagagtgtcaattcgagatctttctagctttctgatatgggtatttagtgctataaatttccctcttaacactgccttagctgtgttccagagattctggtatgttgtttctttgctctcattagtttcaaagaacttcttgatgtctgctttaatttcattatttacccaggagtcgttcaggagtaggttgttcaatttccatgtagttgtgtggttttgagtgagttttttaatcttaactctaatttgattgcattgtggtctgagaaactgttataatttcagttcttttgcatttgctgaggagtgtttactaataactttttaaaatatcagtgatttttccaggtaatagacatttatggctttgaaatttcaaagtatgtttaaacaaaaaaattcatcaacaacctcctcccacattctgcatttacatttatcattatcatgtgtgttcttatacttttattattagattgaaaaatatacaattgccattcttatagattaaaaatggtcaaacattggctatttcaaatagttcaatatgtaagtatctcaaaataatataacacatgctgttatctttatgttgttagtatttatgtaagtgctcatatatatatatgcacatatataaaaatacagagtatatcttcaatttgcctttttcataaataatttttctgagaattacccattttgatattttgttcattcattttagtttctctattagtattccactttataaaaaaaagtatggattatgtatttgtttccatgtggagagttagcttttctctttatataatttatagaagattgcaattaatattttgtatgtctccttgtgtgcatttgtgagaatttgcacagaaaaagcacagtgaaaggtatcataggcttcttaagtattcttatcttccattttgatatatcgccaaactgttatctaaagtggttgaaccaatttgccttcctatggcaacaggtaaaatacccatttgcctgtgttatcaacatgttttgttttccaacatttttgccaaaatcatgagtataaaatactcccttattttcgttttaattttaatttctttagtaactattaaaatattgaaacatatggcatttgagttttcgcctctgtgaattgcttgttctggtatatctttcattaaattttccattgcatttccttgtcagtaaaagttacacttataatctgcattttacatgttttaattatattgattgtaaaaatatttccttcagtggtttgacttttaaaattttttgtatttttggtctgtcacacaagagttttaaattttaacattggcgaatatatcagttactttttatggttcagatagttttatatcttacttaagaaattctcttttatcatgatatatattgccttctattttttctgaaattaatttttgtataatgtgtgaggtagagatttaattttaacttatctttattggcacattcttgtcccactgatttttattgaacacacattatttcctcactgatttttaaagccacctctactgtatctcaagctccaatttgatggtagtgtgtttaacatcttgtttcagaggtcaatttgattaacttcttgccaaaagctatagcacttgattatcttttgatatcttgcagtggattccttcttaccagccttcttcagctattgttaggtcttactcctccaaatgaattttaggatcagtttatataaaaatgtttattgagattttttattggaattgaattaaatttatacaacagcttagggataatttatattgttatgctgatttttttcatccatgatcatagtatatcattctatttatttagatcttcttttatgtcttttagtaaatttctataaataaaatactcataacttataataaaagggataaatataaaatttattcctaggtatctcaaggttttggtgctattgtaaatagtatcttttattaaattgcattttatatttattgctgatataaagaaatattataaattgttatatatcattcttatttccaacaccattttggaacacattaattcgaatatttgactatagatttatttgaattgttgaggtagaaaaccatgtaatttgcaaataatatatttatgtcattctaattcttatggattttacttcttttctttgtctgattgtgaggtctagacattcctttaacaatcttggaaaaaaaagcagtgagagcaagcatcctcaacttgtcattgctttaatggaaatggctttacattttttcctttaaataagatgtttgccatatcacgttaaaaactttcccacctattcctaattgtttagggttttctacttgtatattatgtatttttcaagacatggcagatttaatttgttgagatataattttcatgcctatgctaccaagtgagattggtcctgtcgttttcctttctcttaatgtccttgagaacatgtttcagctctcccatttatgacctgttttaccttgggcaaatttcttaatatctatatgcttcagtttcctcatctttaaaattagcatcaaaagaatatctttccatagtgtttttatgaggattaaataaaataatatacataaagcacacagaacagggcctgctactcagtatgcaatagttattagctgtcattgtcatcattaatattaagatattttaaaacacttttcccctaaaatacttagagtactttgatgcatatcctaagatctgtctctggctgctatttctggacatttctttgttgtaatatttctggtagctcttacttgtgactgtgaattgtagacatttgatgcccacagactattcagctctttcaacttctaccttgttcctaaggaaatctgaatcaattcatcagggtctttcctaaagaaatttgtcgaagttatccaatccaatgccacgattatatttcttcttgtatgattgtgtttttgttgtttgtcaaagaaatttttgcccaagtcaaggtcacaaagaattttcctgtaattttttctagctatattatagttttaggttagttctattatccatattgagttaaacttttacataaggtgcatgatatgttttcaggtgctttaaaaaacataagatatccaatattccaggaccgttcttggaaagaagagtattctttttccatttaattttctttgccacttagttaaaatacagtggactgtgtatgattttattatcagcattttcattgctactgaaatgcagtaggtatgcaattgattttcatgtattgatattgcaacttgcaactttgctgaactcatttataattcctaatagattttagtagatttcttagagttttctatgtacaagagatagttttacttctactttttcaatatggaaagatttatttcttctgcttgcctatttgccctgtctggtaactacagaaaaatgttgactagaagtggcaaaagtggacattgttatcttgttcctgatcttagggaaaaagcattttttcaccactaaatatgatgttagctgttggtttttcacagataccctttattagatgaggaagttgtcttctttaatagttagttgctttttaaaaattttatcatgaagtgttaactttgactatgtagctattaagatgatcatgacgtttttgtcctttatttttccaagtttgtgtattacttgattacttttcgtacattgaaccagccttgcatccttgtgataattccacttgctcatgatgtatgatcctttttgttagtactgtatttggttcactagaattttgttgaagacttttgcatctgtattcataaggcatattggcctatagttttcttttgatgtctttgatgtttttggtattagggtaatactggtttcatagagtaatttggagagtgtttcttcctcttctattttttggaagggcttgtgaagtaatggtgctacttcttctttaaatgtttggtagaattcgccaatgaaagcatctggtcctaagcttttctttgtggaaatttttaaaaaattactaatttgatctcttttagtggtatagatctattcagattgctaatttcttcttaagtcagtttacatagtttgtgtgtttcttggaatttgtctattttatctaggttgtctaatttttggcatacagttgttcatagtatcccttatgatccttttttgtgactgcaaagtcagttgtaatttcccttttttaattcctgattttaatcattagagtcatctcttttcttggctagtctagttgaatgtttgtcaaatttgttaataatttctaacaatcaacttttgttgtttttcttgttgtttttctattctctattttatttgtctgctcaaatctttataatttcctttcttctgctagctttaggttgagtttgtttttctttttctagtttcttaaggtagaagattaggttattgatttaataaatttctctttaaatataagtgtttacagctctaaatatcactttaaacactacttaaatcccataaagtgtgatatgttgcatgttcacttccattaatctcaaaggatttttaaatctttttgtaatttcttctttgatcattagttattaggaatgggttaattttcacacatttgttaattttacaaatttgcttctgttattgatttctaattttttctattgtgatccaagaatatactttgcatgatctcagttattttaaatttatagagacttgttttatggcctaacatataatctatcctggagaatgtaccatatgcacttgagaagagtttgtattctgttgttgttgggtggagtgttctgttggtgtctattaagtctaattggtttataaagtcattcaggtcttccatttctgtttgtattctgtgtagttgctctctccatgattgaaagtaggatattgaagtctccactattgttgttaaatggtgaatttttctctttaaatctttaaatttgtcattttactgttgttagacacatacatgattataattgttttattttcctgatggattgatatcttaaaatattcttgtctctactaaaaattttgtctaaagtctattttgtctgatgttagcataggagctcaagctctcttttggttattgtttacgtggtgtatctttcttttcattcttgaacattcaatctatttgtttcctcgaatgtagagtttgtctcttgcagaactcctatagggggtcatgtttgtttgtttttccattttgtaaatatctactttttgattgaagtgcttaagccatttacatttagcacagtgactgataaggtagttacaatgtcactttgctgttggttttttaaaatatgatttatgtcttctaaatttctctattctttcactgtcttctttgggttaaaaagttatcttctagtgtataatttaatacccttgtcatttattctactatgtttgttgcccaggatgttatcattaacatcttaattcataaaaatctaattcaaattaataccaacttaattttaagagtatgcaaaattttgcacctatatagtttttgttcactctgctttcttttgtgccgttattgtctatggagattttttacattggatgcccatcaacacagatatataattattgctttataaagtcatcttttaaaacaaatgtgagagagaaaaagaattacagtaaaaatacatttataatctttttaaatatttacctatttaattacctttacaggtactctttatttcttcatctggattacattgctctctaatatcctatcatatcagccagaaggacttcttttggtatttcttgtagagcaagtctgatagtgataaaacctctcaatatttctttatctggaaatgtcaatttatcctgcatttttgaaggagagttttgctagaaaaaatagtttttggtgtacagtttttttttacgactttaaatatgtcattcttctcccttctggacgccatggtttcttcacaagaaatctgtggttaatcttattgaagatcccatgtaggagatggccttttctcacttgctgctttcaagattttctctttgtctttgtctttcaacagtttgatttttaatgtgcctagggtgtggatctatttgaatttatcccacttgcagttcattgagcttcttggatgcatagattaatagttttcatcaaattttggaagtttttggtaattatttctctaaatattctttcagtccttttacctcttctctgaaactcccattatgcctatgctggtactcttgatggcgtcccacagctttctggggctttgttaatttctcaacattctttctctttctattgctcacactgaataatctcaattgacctgtattcaagttcattaattatttcttctgatcatttagatctgctagtgagctcctctagtgaatttttcatttgaaagttttctattttctatttattttttctttttttgatgaaatgaggtctcactacgtttcccagggtggtctcaaactgctgggctcgtgatcctcccacctcagcctcccaaagtgctgggattacaggcatgagccaccatgcctggctaaaaattttctatttcttttctcatattctatattgtctaaagcatcattgtcatactttgctttagttctttggacactttgttttgttttgtttttagttatttgaacatatataaaatagttgatttaaagtctttgtctggtaagtttaatgtatgagcttacaattgacccatttccattgcccatttttcttcccctgtatattgtttgtaggagtttctttgcatatgccatattctttgttgaaaaccagacattttaaacacatagtgtagcaaatctggaaatcagattatttccctttccagagttgttttgttgctgctatttgtcactattactactgtttgcttgtttagtggctttcctgagctaattctgtgaagtctgtttctttgtcatatgtgataaatgaagtcattgtttgctcatcttagtagtcaggcaatgactgaacagagaatttcttaaatgcctagaaccaatacattttccagtctctggtgagagatctgtacgcatgttgcagaatgccatcaacactgaggcagtttaacactctcctttagtccccacttcctgcttgtgcagagcctcaaagtcgagctgaggtgagaccttaggactttctcaggtctttctttagcatgcgcatatacctgagcacatacttagccttttgcatgttcataatcttgtagattcgcaggcattttttaaggatttgcaaagcgtttatggacatgatgtttcacatcttctccttttaagtattttggattgtttgttgtttcttctgactgttgttactgcctgggtcaactgcaatgttaagcagttgccagtgattatttttagcaaataattgttttaaacaaacagagtaaatgctgtttccagtggatgaactctgagtcaattcaagccttactagtggggctttccatggtacttccaggcagatcgaataatgacaatcatctgaggatagagctttgaaacagctccactcccattctgatcctctagcagtaactaggctgctggttttcaccctgattgcaaactgttcattttcagggcttccagagagtggcagagaggagtacgggaataggaaagctaaaatgccatagaacatgttgttcttaccaatattcagtcatttaaaaaataaacactgtccacattgttgcaagtctttgctttatttccagagttctcaataagttgatgtgatattctttgccagtgttcccattgcttttatggaagacagactcttccattgttttcactctgccattgctgatgtccttttattcgtttcctcaatgtcttatagtttttacctatatacattgccttgctttaatagatttataactaatatttcacattttcagtgctaataaaatagtatttaaaagttttaatttccattggttaatcactagtatatagaaattaaattattactcatttaacttctatcaaacaaaattaactaattcacttgttatttctaatagcttttatgtacagtcatggaaattttctgagtagataattatgctatctgcaaatgagagtttatttctttccttctgattgttgtgacatttgttacttagccttattatctgtttttaccctgatttatatgttggattacttagttttcccatttgactaattttgttgtgccacccagttgtaatgcataacaacttctttccagtcatcacctgtctattttctgactagacagctatgaggtctttcttgtatgagtcatgtctatttccttgatcaatttatataatttagacatatctttgccatatgaatatttttcaaagaagaatttttatggaatgtttatcccaatgaatatctgttgttaaaaaattggcaagtagcaaaggaataagtaaaatttatttctatggctgtccttgaaatatttgatagtattctcacctcaaatcataattcttttatttgggatggatgattcacattaactctaggtctttagaaaacttgctgtaactcttttttatgaagaatttcttcaaatatgaattctttagcaatggatatgattgcaagctccaaaatttaaaactaaaatggtttttaaaggttataaaacccagcccctttattttatagataataaaatagatttcattatccccctgcagcagagcttccctttagctattattaaaatatagggagtgaattctaatttatcagcattgaaaggtacacctccacttctaataccctggtctgactgccaacatttttcacacatatgactgtaatatcctcctaactggcctcttggcttctactcttatcttcctatattctagtctcagaacttttgaataatcctgagatcacatcactcctcttctcaaaaccctccaatggcttcccattttactcagaccagaaatcaaatttcttacagtaggctattagactttgtatatataacaatttgtacctccatcctcccctctcccccagccagctacttgtctgacctaaccttctaataacctccccccttttattctgctccaggatgctagctccttgcacctcctctaacatgccaagcatactgatttagaggtctatgtgcttattaatgcctgcctggaacattttgcccctagatatacgtatgactcattcccattcccctgtcaatgccacattctcaatgaggcctctcttggacataacatccccactaaaatctagccatgctctccaacctgctctaatccttctgtttttcataaaatgtattgcattctaatatactatatgaatttctcattcattatgtttatctacgtgaatgcaagctccataaaagcaagggtattttgttgttgttgttaactgattgtacttttggcactcgtgaaagtgcctggcacataataggcttccaataaatacttgtgaatgaatcaatacgtaaaagaatgaagccaccctgacatttaaagccatggttcaggctttagcaacatcacagtgttcatcagttttgctgtctttcagttatggtaagtctttcaaaattatgaatggctagcccctgtttgttatgatctgggttctttgagataaaacacttccctagaggttatataaaatattttagacaatattttatcctgagaaagcaaattggataacatgaaatgcaggtaatttctttttttctccttgatatctcattatgttggcaaaaataggaaatgaagactgtcagttttccacggctgccatgcaaaagtactgcaaactgggtggcttctcccagaaagagaatgcctaggactatagcggggcacagaaagttccccacaaggagtatttcaaagctgagacattaggggctgtatgaggcagaaaaattggaagcagaggcaaaatgggaaccttagggctgagagagcctgaaggttgtggggcattaaaaattcatgctgtagattaacagtgtggggtgtaaaggatgctaggagaggaagaactgagcatggttagggatagttgaaggtaaagaaaaaacgggacacaggcccagcttccttgacaacattatctcttacctcataaataaaatttatgctatgaggagtgactttcctattcgtctttcctattccccaaataaaagcataggcacacaatggctttgctgtatttgcatgtattcttctcatctttcttctaagaatgacatgtccatctttctaccattccctctttgtttaactttagatcctggatccaggtcaattgatcataaatcatgttgcctggatggccaattaactgaaagaatattttaccatgttttcttatttcttgtaactaattataaattttagaacaatttgtgttggaaatcttctaaagatttctgcaaagttttagtagatttagttttgtcttcataacaccacttggaggaataattctttgcacttgtgccagctgcctgttttaggatagatagagtagagaaactctccctacgggaaagtcagagcaggaggctgcctagagcacatcttcttgtgggcctcagctcatggggtatgtggaagactgagactaatgggtagaaagagagagcctataagtgtatttttcttagactacatcagctgagaatacactaatgaagaaatatttttatatgtaatattttggttattttctcaaatatattatttaatataaatataacatgtaaatatatgaatatacacaaatatatgcatacacacactcacacacagacacatactctttttaggctcctaagtctcacactttgcttgtgagtttcttcctgattctgagatcactatctcagactacttcgtgtgctaattctcctctccatgttttatttatcagccatatcctcactctgtcccagtttcctccaagcaaccaccaaggagcagcagaaaacataaatcaaacattctttaaaactctatcaagacagagtgaaaactgaatagttaaaagaaaaaacacattgggaaaatggtcatttgatgattaaaattgctccaattttatttttttagaactattgaaataaacaattattgaaataaattttgttattaaaaatataacaaaaaacttggagtcggtagtttttctgctttattctgtctccactctcttgggcttatttgtctcagtaagttctgaaaaaatatttgccaaacaaataaaataataccatgtggattaaggttgatagctacatttgccttgaaaggtcacctaattcaaagtagattggtctttgaacctggttttcttagaagattttccctgaggcaataaaattctgagagtgaactatgatactattgatatatgtgaatgacacagaacctacaagtaggaagtcttcgatgagtcctcatttggagattttctagaacagacattaatttaactttagagagaacccaaacagatagcctggagcttggagctataacaggtgggatgtgagagtgaggaatcttccttttggcattgcaaatactctggaaattgcaatcagaagcagatgacaatcaaatttagggctgatgagataatatatctatggagttataaactagagagaaatttgacttgggaagggacttctggagaaagccatgagttcgatcagtaaataggctggccaaagtattcactttgacttaagtcctacagtgtccatggagataactatgattatttttgttattaatgtggaattagcaaactagagattgatctgtaaaagtttcaaagggcagtgacataaatatctttttaaccttaacatcttcaaaggaatatcacttaaatacttgtcaggtattgcttggtaaacagagacttcttatattatgcacatgtgtgtatttgcaggtttagagcagtttgtcggaagaatgcaagattttcgattataccaagtggcacttacaaacaggtaagcagatgttgcattgtaaacctcaagaaccgaaaggataaatgctgaattcacttaaataagaatactatgtagattataccattttttatctttataccatttggcaaacttcacctaattaatgtttacagtgtttgctttggcttagtctatggttgttattcactagtgctactcttgaggaactccttgtaatatgaaattgatcacatttttcctaaggatattctgtaagaaaacttgatatttgaacattttataaaacttgggatacaatgcttaaattttctatatgaggtagtttctattaacaatacttgagaaacttctacatctgccttttttaaattggtttgttgactttatacctactagagaatgtagaacaataaacgtgattaattattttgatacatgggaaattctcaagagactgatctattagacttggagacaagaagaatgagcatttgaagtattgtgatatatttttctattttcagtgaacaaataattatatagactcaggctagctttaatgacattatttccttatcttgagagtagatgggaaatctttcttagggcttcttaaaagcacacagaattttaaaaaatttaagtgaaattctgcttaggatgcctttgaactttcttcttcagcttatgatatcatggtataatagtatattgttgtatggatgagttgatcttatttacttctattaaaaatcaaaaagaagaatgttcattcatatttcttcaaggcagatataaattagtgtggtgggtttccaaatgagaagactagcccttgtaaatttagaagcattgcttttgatgtggttcttagtccatggcagatcattaacaatataaacattctttcttaccaggctatataatcaaggtatgcctcagtaaagggtgccatggccctggaacacagtgttaggtgtatttactgccaaaagccttactatattttagatcacctttgtctaaaatgctgaagggcaatgttgtagtaattctttgggaataaagtttttccttgggagtgaaagattttatactggattctatactggtagcttttggtcccattcaaaacttggtatcagttgaaaagaattgatgagatttaaagaaggtatgacttcatgtgatttaatgaatggaaaagctgcctgactccttcactgctccactggggtctgagaggaaaagcctggtttctctggtaagaccttgattactaattttggcctacctgaaatgtctgggaaggtgctatgtggaagaatgcctataaatagaatgactaattctggtctagaacaagtatattgcccctaatggaaaaattaaatatatctacctggaattggcattctttgactgttggcagccgccatatgatctgaagccaatgaagcattacaggatgtcaggatctgtactgatgagtcacaggaaaccattgacaaatggccttggcctcagtccttcacttaaaacagaagcagataaaatgatacttgctttcgtacttctttcccatggatgaactgaaaacattatctataactctcattgttctccatatattattgttcactctcagtagttagtttagcatcctaagtaaatgtgatcatttctatattatcacaaatagacacggtaaaatattgtggtatttaaataagtatcttaataatcagacaagggcttatgcatgcttcttgatataaataaaaagttaatattaaaatgtgtgggttttgatatacattttatgataatgaatttgtttatttggccaaaaataagttttattttatgtttcatgcatcaaattattaaaactaaatggatactcatgaaagcactaaacgagtgacattcatttgtaacgactcctagaagttctattactgttaagctctttgtccttacagtctccctcttgactcccacagagagattctggaagtcttctctggagatcttctcagattgcatgcccaatcacattgccgttgccctggcagccacccgcgggtccaccctttggcacagcggtactgcattcctaatgatgcaggagacacagctgataatagagtgtcacggttgaatcctgaagcccatcctctctcttttgtcaatgataatgatgttggtacttcatgggtttcaaatgtgtttacaaacattacacagcttaatcaaggagtgactatttcagttgatttggaaaatggacagtatcaggtaatgagaaacgataaggtgtacattaatttcctgtggttattgcaacaaatgcccacaaacttcatgtcttaaaacaacagaaatatattccctaacagttctggagatcagaaatatgaaatcaacatgttggcagggctacattcccttaaagattccagaggaggatccctccttgccatttgcagctcctggtggcccttggtgttacttggcttgtggcaccacaacttcaatctctgcctccattttcacatggtgtccttccttgtttctctgtgagcatcaattatcccttttctttctcttatataaggcccaccctattagacccaggatgatctcatattgacatccttaattatactgcaaagaccctatttacaaataaagtcacatttacaggtttggacagtagtacttggacatatctatttgggaacacaattcaacccactacaaggtgaaaactgaactaggcaattgaaccttgcctcaataaagtagtgtattataatgtatacaataaaaatatctaaaagacaacatgtaggaccttatgtttgagatttgtatcaaaatgatatttatgaaatgttgaaaataattatttttattaagtagcaaaaattaatacaaactaaggtgctttttctaaattaagaagtctctatatatgacatttatttcatagaagtaatgttctttgtttatgtctttatttgcatgttgatttataaaatccttgagcaaatgaacagatacacaattatagaatatgttgcttttaccacagggctatgaagtttctggatgtctaatacatatttgataactataattatgatgaagtgagccaatatatttgaatctaataattccatggtttgatatatactgatggttaaacttaaaactttaattacattaattaactttccattttcaggtgttttatattatcattcagttctttagtccacaaccaacggaaataaggattcaaaggaagaaggaaaatagtttagattgggaggactggcaatattttgccaggaattgtggtgcttttggaatgaaaaacaatggagatttggaaaaacctgattctgtcaactgtcttcagctttccaagtatgaatatttttaaacaattaatttaatagactgattggttattaataatgtacaagtatgctagctctctaggctggtggagacttcccttcaccaccaacttccttgaggcagattctcctaagtcttatccctaaattgggcttaaaactatgtttaaagttcttgtaaaagacattagagtgactcttatttcaatctcactgatgtttcacaatctgattttcagattgtttggcaagttatctatgtaaatagaattttcattatgttttcaaggaactgttttagtgtggctttctatgataatcctgtattgtttatatatgaaatatatggaatatgcttttcctagaatgaataatttaagcttttattgatactgtgtagtaatttctcaacattttgatttctgttttgccaaaaatgtgaatagattttcatgacatcgaatttctttcattaacagttttactccatattcccgtggcaatgtcacatttagcatcctgacacctggaccaaattatcgtcctggatacaataacttctataataccccatctcttcaagagttcgtaaaagccacgcaaataaggtttcattttcatgggcagtactatacaactgagactgctgttaacctcagacacagatattatgcagtggacgaaatcaccattagtgggaggtattattatgaattttgttttcaacaaggtttttgtcatacttactgtcttaacagcacattaagatgtcagagcaagccagatttcaagctttacattttgaaatgatttcatactctaagattttaggggaagatctgtatgtgagtcttttctctatataacattgttatatatatatatatatatatatataaaacgtattttataaataaatatatatatatttatatatacaggaattgattttcaaaagctgttgcttttagaagctatgatactctgaatctgacttagaagtgatttatccaatattttacttgatttgttctggaatataattttcaaatattctcaaaagcaaagagatggagctgaatttggagttgtaactatagcaccagagagtttttaagtacagatcttgatctacctgagttcatagtgcacagttccatgggtaatacttgtttttctttagtggaaagatctgatatgccctaagtagtttataaatgtctgatcataattgagaacatgactcacaatatttaaaaagaaatgacagctgcaaacctaggcagcatactgtctaatatagaaatgtacatatagagtatatttagaatggattgttctggaggaatgataggccttgtgaataaaatatgtctttaaaagcagaccaaaataccagtatataagcattgtttgtttgctaagtcatagcataatgaacaaagcaatactattaaatattcatcatctaactttggaaaaaaaaataaaaaaattgaaatatgttaactgcattctgcagtttattgtcaactttatattcttttttctttcttttttttttttttttgacaggcttttgctctgtcacccaggctggcatgcaatggcatgatcatggctcgttgcaacctcgacttctgggcctcaagtgatcctctcatctcagcctccaaagtaactgggactacaggcatgtgccaccatgcccagctgattttttttttcactttttgtagagatggggttttgccatgttgctcaggctgctctcaaactcctgacctcaagtgatctacccgcctgagtctcccaacatgctgagattacaggcgtgagccaccgtgctcagcctgaactttatattcttaactgtattttaaatagtgtagtaaatgccttcccttggtacgtggttggtatagatataaaaaattccatttccctttagaggttggcttgaaaattatctttacaatacacgggtttggatattggtgacagtccttctgacatttccagataaattaaaaacgtgtatggatatccacacgattaaggagaaactgattttgtatcaattaaatatacaaaaatcttccctgttaaattcacataatgcatatagtcctaggaccttaaatatattcacagttgagttggtgttccttaggagtgtgtgatgctcatgtttgcagatgtcagtgccatggtcatgccgataactgcgacacaacaagccagccatatagatgcctctgctcccaggagagcttcactgaaggacttcatgtgagttctattttatgcatggaaatctaaaaaaaaaatagtagagatggtgactataaattctatgaacttaatcttggcctaacaaatgaaaataaatttaaaaactgatatgaacttaaaatgtcaattattgcagattttttaagaaaaataacagccatcaattaagttgaaattgtagtttttaaaaataatttcagccagagaaattacaactgaaaccaaaccctaaggttcttttctcttttgtttttctttctttgtttcatcagcattatcatgttttataaaacaatttttaatgtgtttggatagcatggcactaaacaaaaaatagtttgattcttactaaagggtatttatacaaaagtatcaataaacaaaagcatcgttagatgaagaacaatgtttatgtatttatgtcaatcaaggttcatttattgctaatatcaggcattttaattaattgaaaatctatagtaaaatgatttatgagttatgttactttagttttctgtgacgatcaggggaattccatagttgaggtggaattttagcttcatctttagggaaaagaggtaagtggaaataaaatcaagaaacattcgttggtaggaatatctagcaacaacatcagaaatagctgatatgaaagacggttcagcagcagtaacaattataccaataatgagagtagataatatagactcttcagtaaatatgtttaagacaactggctgctaatttgcaagaaaataaaattagagctctactgattgtatgtacaaaaatgtatgtggcttaaacttttagtgaaaaataactataaatatattaaaataaagattagaattctatatcttaagttgagggcttttatcagctaagcaaatgaaatacaaacagaaacaaacatctggagctatgaaggaaattaatgacatattctgttatataaatatttaaaattctacacagtataagggttaacataaatgtaaggtagtgataaatgatggattgatagaaaatatttgcatcatgttaacaggtaaagagttaagattcctaacacacaaacatttacaaaatattaagaaaaatataacagtctgataaaaatgagcaaatatatgaacaagcaatttacaaatgaacaaattgtaactttaataaacatataaaagattacccaacctcagttttaatcatattcaacaattgtttttaacatttcaaattagcagaaaatataaagattggtaatatttagtacttgtgggaatataacctttaacacatcactgatgggattgccaattgacacaatagttttggggaaaatttgtccacctctactaaaattaaattttcaaatatagtgaactacattatataattgctgtcattctgaaaagcagttcttcaatgacaagtgtatggaatggtgtattagtctgtttgcattgctgtacaggaagacctgagactaggtaaatataaagaaaagaggtttatttggcttgtggtactgcaggctatacaagcttggtgccagcatctgcttggtttctggtgaggcctcagaaagcttacaatcatggcagaaggcaaagccagaagccagcctcttttaaacagccgtgtctaaacagccatgaactaacagagtgaggtctcactgctgaagggaaggcacttcatgaaggatccacctccataacccaaacatctcccaccaggctcacctccaacactggggatcacatttcaacatgagatttggaggggacaaacatacaaactatataaaatgcttatatttctatcattttgttacataaatatgggcttatatgttagtgcattttagcttttcagatggtagcactgtctcatacactcatgtatgacttgtgaacatctctgcctcttggaccttgccctacacttgtgttttagttagttacttcacttctctgtgaaatttattttaggatattatagagcatcttgctttttaaaaaaccatctgtaaaggttttggcaaattccatttctgtcttctgattcttactctgatctaatttgcttttgactgtaacattagtgagaatagttcaatggtaagaatattatctataatgcagactttctctagcacattcaaaacgtagtcccactcctcagtttcaactaagagtctttgatttagttatggcctactttctttctttctttctatgtgctcagaccaaaactttcatgttctaatttagatattcttttgaatttattttctagatcactactttatatacatctagtcctcaccattagtcaatacttgctttaaaagaagaaatcttttatggttttcttttggatttctaatgcctagagtctttgcatttgatttcattagtatattatgaggaaaaatcttttagaagaactgattttaatatgcttgattgtatggcttatcatattgtcacagaaatgaaattaattggattaacttgattgatttattcttcactgagccataattgtgtgtttaaatttttgccaattttatttgttctagattttaaagttaaagcaacatttattatatttttctactgtcttcttttgatcccttaagatggacacttacttccttataatcagtgatttctttcattaaccttgtcctctcctccacaaagccactaacaccccaattaaaaaatgctttgggatgaatttagcagggcaccttgaactgaatatgtctagtatttgcaagctacagtttggctaataccttcatatgatatgttcttttctgagcttctcttgctttctgttgactagtcagtcggtattagtctctctcatttgcttgtgacgtcctgtcttgttttatctttctgtctttaattgctcacagttaagtgttggatattttctgattcttggatgatttcatgcttccccttaaaaatagagccattaaatgaatgaaggctcatgattggtttcagaagacaagttgggattttcagacttggtctcaggtggtgaatgttggattatgaactagtgaattaattaactataatttgggttgagaatacattttaatgcttcttatttagaccttaagtaccttttgaaaacaaaaatgaaaaactaaactttttttgttattttcctccttgacatattttgatagtttatgaatttagccataaattttaaaaagcaacaaatataatttacttagcaaactttggcaaatgcaaatgcagctgcagggaaaaagtcaatagactgttaagttgaatgatttctcagtcctatgatattttcaataatgtgttgaaaatgaaaaatgattttatagaaacattcataggcatgacattctcctttgttaccattcaaagtattttaatacaagtagagacttacatatctgagaaaagtcgtcttacggtaatttgaaaatatacctattctaatgcttttcttgttgttctactttttaaaattatacgttttaatataagccattcacttcctattgggatccatgttctttttaagacctggacataatccaaaaagaatgtcttcaattccacagtgttatgctatccattaataatattacttaataaacagggcttttgtgaattatattacagacatttggcaaacagatgaaaatgtaaggactgaaaatatgccaattcttggcaattgtctttcctatgagaaagtgtttttagtagaaacaaaaatgaatgaagttgagaaaaggtgaatggtgaattcaggggcaggttcacatatttagccatcctaaggaattttccgtacaaaatactattcatttgtttataaggtcaatgtcacaaattggtggctcacaggtagaaacagtgtttaaacagttttaatttaattttctgcaagagttttcactttaaaatatttatttattcttcaatcttttttatttatttatttttttgagagggagtctcactctgtcaccgaggctggagtgcagtggcatgatcttggctcactgcaacctcagcctctcagcttcaagcaattcttctgcctcagtctcccaagtagctgggactacagctgcacaccaccacacgcggctaactttttgtatttttttttttgtagagatgggtttcaccttgttggccaggcaggtcttgaactcctgacctcaagtgctccacctgcctcggactcccaaagtgctgggattacaggcatgagccaccactcctggccctcaacttttattttaagttcagaggaacatgtgtaggatgtgcaggtttgttacttaggtaaaggtgtgccatggtggcttgttgcatagatcatcccctcacctaggtattaagtccagaaaccattagctattcctcctgatgctcttccccccacagcccccaccatccctaagaggccccaatgtgtgttgttccccgacatgtgtccatgtgttctcataattcggatcccacttgtaagtgagaatacgtaatgtttgattttttgtaccggcattattttgctgagaataatgacttccaactctattcatgtccctgcaaatgatttatatttctggtaatacacagtaatgggattgctgggtcaaatggtatttctgcctctagatctttgaggaatttccacactgtcttccacaatggttgaactatttatactcccaccaacagtgtaaaggtgttcccttttctccacaaccttggagcttctgcacagcaaaagaaactatggtcagagtgaacagacaacctatagaaggggagaatatttttgcattctatccatctgacaaaggtataatatccagagtctagaaggaacttaaacaaatttacaagaagaaaacaaccccattaaaaactgggcaaagaaccctgagttagcgagttgttgccaggggaggacattaatgtcttcttttgagaactgtctgttcatgttcattgcccaatttttaatggggttgtttgtttgagaacagttctcaaaagaagacatatgtgtggccaacaaacgtatgaaaaaaagctcagcatcactgatcattagagaaatgcatatcaaaaccacaatgagataccagctcatgccagtcagaatggcgattattaaaagttaaaaaatgacacaaatttttaattcctcacttctcttaatcagaacatagtctaacactgtgtccatttcctgccatcaacaactcactgattcagggtgacatttaccacatttacaacagtatcactcttgggcttgctacaacattcactactatgtatatccttatacatgggcgacatcactttggtgaactacctggccttgaaagactcggagcttcttaacctcctaaagcaaaactgatggatagattgagacactagaagctagaatacatttttaattattctgagtagagaaagaccagctgttcattgctatattcattgttaactcctatttcttttacccctttataaaaataaaaactcacaaataaccgaaaacaactcaagaaaatctattagcaaagacactgtttactctgagatgaaattaaagccatgcttactttttttttaattacatttttgacatctaaaaacatttaccttggggagcctcactgattctcctctgcactctttgaccaggaactccgatacatttttgtattgtactggcaattttaaggccttgactttaatgtatgatacataccataaatacttcactcatagagaatacttttagaatacttgtcgcatttctttccaagaatgaaaaaaaagcagtaaatgcttaatttactaggctcactttagaactgatttagggtgaaacaaatccaaaagcctagatgctattcattaactttcatacaaagttaaatatttcaaagtagaaattagaaatacatggtattgaacttgcatgaatcattatatatctcacaagttacaaacatgttatttataaatgtttaatttcatttgaataaaaaatagccactgttacttgcatttttaagtaaacttttaattttgagataattatagatttatatacagttgtaaaaaataatataaagacaatttgtgtactctaccaatttgtcccatggtaacatctggcaaaactagtgtttttttctttttacatcaaaagtgtgatttgtgtacaataaaatatacccacttaaaaatatatagtttgatgagttttggcatatgtgtaccctgtgtaatcaccatccctgtctagagatggaatgtttcactctcccaaacgttctcttatgcttctttgcagtcagtgctgtctctgaacccccaatcccaggaaaccaccaatcttatttctatcaatacagattagttttgcctgttccaaaatttcttagcatagtgttatttggtatgtaatattttcgtacataggcttttaaatcccacctcacccccacttttagatcattccctaattacatgtgctgttagctttactgcaacatggtatctctggcccacttaatcagaaatccattataagtatcaaagtgtatatattaagctcataggtacataatacaagctaggaattggaagcctgggtttatctgtcaactaacatatttgcaaagctataatatatttattacttctttttcttatctagtactttctttacttgatctaagagttcaagtgttgaatagaatctagttttaagaaaagtgttgtcagttgaaacttgaatccttatgagttgtctttttcctttaataactacatttacctttcggggctctggccaagagtgatgcaatgatcagtgtctcagccaagcattggcacttcattggctacttagctattctttcgtcattttgtgacatcattacctgcaagggtagccaagccttcacagagcaatttattagtaaccatgaacacttcttattctttggctctaacttatgacccttttataacattaatcatagatcttatgaattaactacaatcaaactatcagtataaatttttgttagcattataaatagcacagccagcttgaaactttttatataataagccttcctaccactcaataatttgaatggtgccaacatcacactctagaatgcttattatataaatgaatatttctgttatttttgaaagattcctttagagcaccaaagtccaaaagtatgaatcatcatgactaatttgtgtcatatttatattatatatcaggctttaccactgcttattttttctctgtttgttcgcagattttaccctaaatatattttatttatattttaattattgtaatgctagtaaattaattcatttttatataactagcattcacacagttcatattataggatctacatttgatatatgtttagtaagtcaaggtaaagaattttctttcctcactgacatgatgatattattaatctttgaaaaacacttgtactagttctttccgtgagataggtatgtgcataaatgcttttaaaatataagttgaaaacatgaaaaagaggttatgagcatggagataaattaagacagccttacagaagaagcaaatagagatagtgaaagtataaacatagtaaaagaaaagataatatttgaagggataagagtaaagaattatctaaaggtgaggaatgacatgatttttctgaatcccaagtaggctaagaaaagtaaatgcatacataggtataatataatgaatccaataatcaccaaagaccaagcagccagaaagacagaaatctgataatcaccaaagacagaacagcatcctaaaaacagccagagagaaaaatacaaagtgtaagaaattaatttctaagacactactgatatatttctcaacagccacaatgaaagccagaagacagcagagtagtgcctttgaaatgcagagagaaggcaaccaagaaatatggaattgtatttgtagtagtaccatcaattagaaacaagaaagaaagaatgcatttttagtttacagatatatatatcaatattatcaccagcagactctcaataaaagaatttttcgagaatacttttcataaggatatataatgtttccagaaaataggcctggtgtgaaggaaggaattgtgagcaagtaaaccagcaaatatgtggataaatatagaggaaaatttactgcgttaaataaaaataaggttatatgtaagaaagagtataaaaagtagcaggataccattaaatggtcattaaaaatagcatttaaagggaaggggtaaactccaacttcagctccctctagccattctgttgcaccttggggtaagaagagcagttactgagaaatacttgtaaagttcacagccaatgagcacagggctcattaaaaactgaaaactaatcctagaatcatagaacaggggtccccaacccctgggccactggtcagtagtggtctgtggtctattagaaaccggactgcatagtaggacgtgagcagctggtgagctatcattacttcctgagctctgcctcctgtcagatcagcagtgacatgaagttgtcataggagcataaaccccattgtgaactgtacatgtgagggatttaggttgtgcactccttctgagaattcctgatgctttgaggtggaataccttcatcttgaaaccattccccatgtgctgccctcacacccagttcgtggaaaagttgtcttccacaaaaccgatccctggtgccaaaaatattggggaccactgccatagaacgctttccctcccctctcatcttaccaccacaccatgaaaggcctgtttgccagagttccctttactcagtacatcatgtctggatttcaacaaaaagttacaaagcacactaaaacaccaaaaacaaacaaacaaagaaacaaacaaacaacctcacagtttgaagagagagagcaaaaatgagaatgagactcagacatggaaaggatatggaaattatcagaccagaaacttaaagcggctctgatgaatacactaaaggctctaatggaaaaagtagacaacatgcaaaaatagatggcaatataagctgaaagataaaaattctgacaaagaagcaaaaagaaaagctagagatcagaaacactttcatagaaataaagaatgcctttaattggatcattaatatttggggacagctgataaaagaatctgagtttgaagatgtgtcaatagagactaccaaaatagaaaggtaaaaagaaaaatgactgaacaaatagagcagaatatctaagaactgtgagacagctaccaaaaatgtaaatacatataatggggaagaagaagaagaagagaaaggaacagaagaaatatttggaacaataatgactaagaatttttcatattccaaatgcagaaaaatcaaagttagggaaaaatatcttaaaaggagcctggctgaagggggaacatctagcctatgaaaaagcaaagataagaattacattctacttctcctcagaaagcatgcaagcaagaaaagtggttaaatagttaggtgttgacagaaaaaaaaaaatccacctagaattctgtatcttgcaaaattatcctttaaaagtaaaggaaaaatactttctcaaacaaaaaccagtagacttttcttgccttgcaagaatgttaaaggaagaacttcagagagagagaaaaaatgatacaggtcagaaaactcagatttatgtaaagaaagggagaacattagagaaagaataaataaaataacttttatttttcttatccttaattgatctagtagataccagtttgttcaaaattataataagaacaatgtatttcattattatagcatgtgtgtaagtgaaatgaatgatagcaacaatacaagacaccagagggaggaactaggaatactttattattattaggtactcatgccaccttttaagtggtatcgtgttatttaaaagtcaacttggaactctcgcatgacattattttgtcttgatagttcaagctccacctgcggttctcccgtcctccatgccaggtgtcaggggctgctctggatgttaactcttccgccccatgacttccagttccaaaatggcggcacagaaacaagctgccatgccacaaccccaccgcgcccctctcccgccaaaaagaaaaattaacaaatatacattgctgagattatcaccagaaattgtcacgatagtccagaactcaaatatgaagatataactgttcccagggccataaggaaatgagaaacaccaagtggatggtaagaaacctgactttcacatttgtagcactcgttaccccattttgcctgacaccaaatatgcagaagattttcctccaactcacttttttctacactggaaaaattaagattgaggtaaacaaccagcttccccagccattctgggttaccggaaagagacctgtcctatccatgcctcaacccactggaagcgtcatgagtgcctaaagggagacatattcctgaagataggcagagacaaagggggatgtaggtctgtcatccccagcctgggaaagtctgctctgtaacttgaccaatgcagacacaatgtcagagtagctgcttagcagcactatgatgcaggaggattatttcactgttctcctcggcacaaacccttaggcagccttcccatactgtcaggatattccctttgggacctctcttgttaagaagggcacaattggattgtttactgaagccaaggcgaacctgggcttaaagcgccccctatagctccctagaggaagcaatttagcagcaaagacatagatgtatgtccacaagaaaaacagcagtaggaaactatgatgtctccaaacagacaaagcagggaaccagggactggccctaacaagacagtaatatgtaagctccctgaccacgaattttaaaatgcagttttaagaaaactcagtgatctccagtagaacacagaaaaataattcagaaattcattagagaaatttaacagagattgaaattttaaaaaatctatcagaaaccttggaactgagaaataaatttaccgaactgaaaaattcactagtagctctcaccatcagaatggattgagcagaggaaagaatcagtgagcttgaagacagaatatttgaaaatatatggtcgaggagaaaaaaagaacacaaagaaatgaagatttcctacaatatatagaaaattattaatacctcaaaaggccaaatgtaagaattaatggtattcaagagggagttgaagaggaaggattagaaatcttattcaacaaaataataacaaaaaattccaaaatttaaaagtatacttggattagttataaatgtatattataagctttatagggcaacccccaaaaaagttttaaaaaggtatagttgatatatttaatacttacaaaggaaagaaaatggaaccatgtaaaaatgctcaactaaaaccacaaaaggtaaaaagtatatagaaaacaagaatagaaacaaagaacaagggcaatgaataaaaagtagtagatattaatccaactatgccagtaactactttgagtgtcaatggtctaaatataccaattaaaagagagagattgttagaatgaattgaagaataaaaccagctcattttataatgccaacattaccctgtaccaacatcagacaaagaaattacaagaaaagaaaaccacagaccaataactctcataaaaatagatgcaaaaattctcaacaaaatattcaaaataaaactattaagcaatgtgtaaaaataattatatatcagaaccaagagggatttatctcaggtttgcaagactggttcagcattcaaaaatcagctaaagtaattcctcacatcaacaggctaaaggggaaaaattacaagattatatcaataaatgtagaaaaagtatttgacaaaatcaagcatccattcatgatcaaaactctccacaaataaggagtagaggagaacatactcaacttaatagaaaatatgtataaaaacctagagtgaacatcatacttaaggataagaaaccagaatctttcctactaagatcaggaataagacaagaatgtttcctctcagcactccttttcaacaacgtattaggaaggaataaaaacaacaacctcatttcaaaataaggcagtaaaggagaacgaaagaaaaaggatatatagaaaatagaaattccaaataaataaacaatcacaacaaatctaaatgtgctgaacatattagaattatgagactgtctggctgaaagagaaaacaacatccacctattgtctgagcagaggctgaattagggcaagagaatgtcttaatcacaaactttacaaaagcaccaaaaacaccctattaagcaagatctataatatttttatgttatatttcaaaaagtcaaatgatttagaaatgtataattaaaaatcaaaattttaagtaaagacacattagtgttgcttgttttatggtcctgtgttattttgtaatgggagctgttgtttctaatcagtccataattcctacctaccagttttataaggttggcatgtacctgtctcatagaaggttttacaatcgtctagaaacagactaggcatgatgggacattatacacagctatttttttaaaactgtagagtgtttattaactttttccatttggctccaaagattggtaaatattttctagttgtatacagaggttcgtatttttcctttgccctcatgctgcaatgcagctcagcatggtacttgtgctgagggtgtgagagacatactcaaaaaacaagcacacttcaagtttgaaaatttaagaaagctagcatgagctacataaatattaggcaaaacagacattactgtttcattaaagaaaaagaggcttattgtataattataaagtataaaattctaagtttacatgcatctcataatatagtttcaaaagtataaagcagaattttatagaaccagaaagagaaattggcaagttctaccatcagcatagaagaatttaatacatctcttattaaaaatgtctttttataaaaagaaagaaaagctacatactagcagttgtcattagcaagacaacacatatataactgacaaaggtaacatttaaattaagcaaactatttgaaaaacagacaaaagaagtgaacaagtaattcacagaagaagccagaagtggcaactgaaatggtcaatatacatgtaaagacatgtgcaactttactggttatcagtaaactaaaaaaaaagaatgtgataatattttatactcatcaagttgtcaaagatggcaaaatctggaaatttcaggaactggtaagtggggactcatacaccacttatgggaaggtgctgctgcactatggaaaacaatttgcaaatgtctacgtggaacactttacagtagtggatatgaaggaatatagctatcacatcaacatgaccagacttctcaaacaatcatactacagaaagcttgttttagaataatacatacactgtatacacttatataaattttaaaatcatacaaatagaaagaagaaactgataaaaggataggaggcaggactaacttgcagctccccctcggacagacagagcagcatgtgaagacacacatcatgaacttttctccaagaactactgcagcaacataccaggaaagccacgagaatccacagatcctttgaaggaaatagattgctgctgcaggctccaggagacagccgaaaaactgtaagtgcccaaagtgtgaaagggggatcttccacccctgaacacatagccttcctggggaacctgaaggtccaggtcacaggtgatggatttggccttacctggagctgagacaaacttagagagctgaacaaaatataagggtaaaggaagcagggggaagagccctgtggactctctcagcccccaggaaaaccatttctgactttgtctcctagggtccttgggtaggactgccagtggaagtggggaaagaccacaaggagaaggaaacttccagatgaactctgtaacaatttcgactgaatgccaactttcctagcagaatctgggggtgagggtgaactgggagtgcagacacagcacagaagttgcatcaggcagggaggtgtgaaacctgaaacccctgcttgcttttccagtggggagacctggagcaggggcaagtcctcagccctgttcacccattgcctggaaataaactcagtgctgttgtggagagtattgtgggagtgagactggccttttgggttgcatgggagctgggtgaggcctttcactgccagctttcccctactttcctggtgacctgtatgatgtagcagaggcagccataatccccctagaaacataactccatcgccctgagaaccacacccccaacactcagagcagcttcagcaaggcctgcccaaggagagtctaagctcagacacacctaaccctgaccctacctgatggcctttctctacctgccctcgtagccagacaaaggacataatctcttgagagctctatggccctgaccaccgcctgagaaacttatccaggagactctagagcaagcttgtatcctccctatgctactgccgttgatgctctcttgaaagcgccacctcctgtctgaaggccaaccaacacaaaactagtgcaataaacaaaaatacaacaaaggaccctcacagagtctacttcactcccctgctatctccaccagagcaggtgctggtatccagggctaagagacctgaagactgatcatatcacagggctgtttgcagttactccccactaccagtctggaggctgctagctccactgggtggctagatccagaagagaaacaacaatcactgcagttcagctctcaggaaggcacatcctggagcacccacatccagggagcacccacatctagggaacacccacatctggggagcaccctgtgggaagaaagaatctgaacaacagcacttgagccccagatcttccctctgacatagtctaaccaaatgaaaagcaacctgaaaaacagttctagtaatatgacaaaacaaggttctttattatccccaaaagatcacaatagcttaccagcaatggatctaaaccaagaagaaaactctgaattcccagaaaaagaactcagaaggttgattattaagtgactgaaggaggcaccaaaggtgaatatgaactcaaaggaatttcaaaaatgttacaggatatgaacagaaaaatctccagataaataaatagcataaataagaagcaatcataatttctggaaattaaggacacacttagaaaaatgcaaaatacactggaaagtcttagcaatagaatccaacaagtagaaggaagaacaccagagcttgaagacaaggcttttgaattaacccaatcaaacaaagacaaagaaaaaaaaaaattaaatgaacaaggcctccaagaagtttgggattatgttaaacgaccaaatctaagaataattggtgttcccaaggaagaagagaaatctaaacgtttggaaaatctatttgagggaataatcaaggaaaacgtccccaaccttgctagagatctagatatccaaatacaagaagctgaaagaacacctgggaaattcatcacaaaaaggtcattgccaaggcacatagtcatcaagttatctaaagtcaagatgaaggaaggaatcttaagagctgtgaggcaaaagcatcaggtaacctatgaaggaaaacctgtcagattaacagcagatttctcagcagaaaccctgcaagctagaaggaattggtgtcctatccttatcctccttaaacaaaacagttattggccaggaattttgtatccagtgaaattaagcttcctaaatgaaggaaaaatacagtctttttccgacaaacaaatgtttagagaacttatcaccaccaagctagcactacaagaactgctaaaagcagctctaaattttgaaacaaatccttgaaatacaccagaatacaacctccttaaagcataaatctcacaggacctataaaaaaaaaacacaatttaaaaaaaagcattcaggcaacaaatagcatgatgaatagaaaggcatctcacatcctaacactaacattgaatgtaaatggcctaaatgcaccacttaaaagatacagaatggcagaaaggataagaactcaccaagcaagtatctgctgtcctcaagagactcatctaacacataaggactcacataaacttaaggtaaagaggtggaaaaagatattccacgaaaatggacaccaaaagcaaacagcagtagctattcttatatcagacaaaacaaacttcaaagcaacagcagttaacaaagagggacattatataatgataaaaggactagtccaacagggaaacatcacaattctaaatatatatgcacctaactccagagctcccagatttagaaaacaattactactaaacctaagaaatgagataaacagcaacacaataatggtgggggacttcagtactccactgacagcactagacagatcatcaagacagaaagtcaacaaagaaacagtggacttaaactatgacttagaacaaatgtacttaacagatatttacagaacattctacccaacaactgcagaatatacattattcatcagcaggtgaaacatcctccaagatacaccatgtgataggccacaaaacaagtctcaatacatttaagaaaactgaaattatatcaagtactctctcagaccaccgtgaaataaaattggaaatcgactcaaaaaggaaccctcaaaaccatgcaaatacatagaaattaaataacctgcttctcaatgattcttgggtcaacaatgaaatcaagatggaaattaaaaaagtcctttaactgaattgtttgatatagtgacacaacctatcaaaacctccatgatacagcaaaggtggtgctaacaggaaagttcatagcattaaatgcctatatcaaaaagtctgaaagagcacaaatagacaatctaaggtcacacctcaaggaactagagaaacaaaaaccaaacccactcttattgacttaataaggaaattaaaaaaagtatgctgagattgctaagatctattataataatgaatcttctatctgtgaaatagtgaaaaaaaaagaaattagtgctagatttgctgtcaaaccacaaagtgcaaaagttacggccgcagtgctagataagtgcctagttcagattgaaaaagcattaaatttgtgactggaagacatgaacagaaaatatgtactatatggaaccaaaatatgtactacatagtacacatagtaccaaacccagttgctgtcacttggcacatagagatctggcatctactggaggtcttcaaatgtattccttgtggaaaacaggactacttactatactactaaattcagatattattagcggagtggaatatatatggcagtatcttgtttctaagttgagtggtacataaaatggtacaattctttttttaattattcataaatttatttttaatatttcagtataatttcccttaaacacaataatatgattgattaatctatcaggaatgtatcacctatgtaaatactcatgctactactaaagacagagtggaggtgactctattcacaatggaataaccattactaaattcatgattactgtgtacatttatagttttactgtaaagattgatcatttgctagctttagtcactcaacaaatatttataaatgccttctatgtgtagtgcattatgctagagtacagccattatgtcttgattacagatgcaagtatttgaaaatattgaaggaccttcatttgtgaaattcaaaaaagattccctggcagacaccaattactataataaatagagatgacttcagtgcaaacaaatgattcaggctaacaattagtaattaacaaataatataaatagtatagacattttaaatcttaaagaaaaatttaaatgcagcaatacttaagaaagggttttttaatttactaatgtagtaatcaagtctaatactacaaaaaatttctaatatgaaataccctttatatttaaataatcaaataccttgtataccagttgactaagtttagaggaatcttaaatattaaaaaacatcaataacgccttatacttcttagtatgtgaattcgtatttgtatgatgtatattattttggagagttgcctgtaagcaccatattaatataatgaatgaagcttttcttcattgaagtcctttgtaaaataatgcaggttatcctgaataaatatggtctctattccaggccatatttcctggaatatcaatagggttaaattattatggttgcaataaaatagaattgctttatcttgtccactatctacaatcttgaataaactttaaaatcctccttctgttctcttaagggaacgtggtgtgtccccatgtgtcttttttatttagtgccctgaacaatccataaataagaggaagaaggaataaagaaggacagagatttcaaaggagaaatcaaatacctaacaacatgcagtattgaaaattaacaaataagaatgcaaggcctctcatgcaaatggttccatctcattcaaccactagacataattacttctgtattcacaaggcctacagtaaggaaatactgtttaaaaaaataggctatcaattatatttatatatagacaacatgtagactgaaggattatccgaataatcctgcctagagtttctgtttttctaaatataggttttatgtcacgtattacaatttgtttcattggataattttccaatcttccatttcactttacccatagaattagactaggcattacttgaattagaatgtttctaaaaatagccacttatattaatagttgaaatattgaagtaactatgtatgatgtgtttgtcgtcattgtattgtcacctatgtttgatcagtattgtccaacagtattagtagttatttattttatgctattaatttcagtatctagagagtgagtaagtacattgtatctgtgaacactttaattatgtaagaatttctagccaagggaaagataattactgaaaaagggatatgtcattgaaggataaacacgtggcatttctgtcttctcagtggtaaagaatagtatttgttttggcttttccaattgaaattacataatctgtaggtaaaaattcacaggtgaagtattattgcatttgcctttaaacctttaatgttactattcaattaaatgctagtcacattaaagtacagtcctgtaatgtgtcataaatgcaatgagtctgttaggacattcactcacacattcaccaaatatatatgatcacctcccatgtgcaaagcacagagccattttctgtctagattctctatgtagttgggcactttatctgtgttcccctctgaaatctatcactgataataaattaacaagtttgtctaacattacctttgccatgggaacattagagctacctagggacacttccattggaaaaaagatacctgagtacactaaagtttttatgtttataaagatgatttctctacctagtagacaaatcacagtgaaactggatcctttgaattaccatggaattgctccagccagaggaaaggggaagccttgaatagagccggaggacaattactattattagagatttaggctcttaacatttccaacatagggggctggtttctactgatgagaaagggaaaatgtacagattttcagagggtctgcaattcattcaggccatctgggaatagttaaaaaaattacctcttttattcagtgagcagtactgtaacagtactaaaaagtgatcattttataatctttcactttgaagcagattgtctttctctccttctcacataggcagtgctgcatccatatctctaaattttatagccaggagtggaataactacatcttttggtttctagggctttgctgtccagtttagactcagcagaaagtaaagatggactgagccagagtgactccagtcaacacctctctccctcgaatactattttcggtccctgaagccagtataaacatggagattagaagtgaggtctttgaaggaaaacatccagatatataaattgagtacctactatgttctagggctccttctaggcacttcttcaacatattgaagacaagttgttttcgatgactcattgtgatcattatgaacttaagcttccaaaggtcattgacactgggagctctcaggaccttgaagggaaattttctccctagcccccagccttttgcaaggacttcatatatctttgtctaagaggatatttttcttccttcttttttcaaagatacatagtaggcatttaagattgttgtataagtgactgaataaataaattgctcttgcagttaaattacttaaacttgtattttacacaagtttctactttctctgtaaatttgaaggtgttaagaaataagtaaaattgagtgtgtggcttgtcatggtggctcccgcctgtaatcccagaactttggtaggccgaggtgggcggatcacttgaagtcaggagtttgagacgagcctgggcaacaaggtgaaaccctgtctctaccaaaaaatacaaaaattagctgggcatggtgatgtgtgcctgtagtaccagatactcgggaggctgaggcatgagaatctcttgaacgtgggtggtggaggtttcagtgagcccagatagtgcctgggctccaacctgggcaacagagcaagactctgtcctttatctccaaaaaaaaaaaaaaaaaaacattgagtctatcaggagtggagttgataaaaatgctttggagactatgggttatctttgaaagattgtctttgctgctctgtaatggtaacgaagaaacactatacttcagtttaatgatccataagaaataactgtcattgtgtattattagaatataatgtaataaaataaatttcatcagtgtcttctagattcaatgactattcaatgattttcatacctgaacatgtcaaagtatttggctgcaacttagcggagttgattagtagcctttaagaagctatcaaaatgaaagcagttaaatgaatcagtggtaaaggtccttgaccctgatatagccattgtctaatctcataatttgggcattcagggacatatcgggggaatccagttgttacagaagaaaccgaaacataattgaaagtgacaaatgatcaactggagattgggaaaacatgaaatagaaaaccatttgcttcaggagctgcctaaaatataagatacacacagagttcttgattttaaatcaaactttaaaatcactggtagaaaaggcagttgaaaattatgagaattcaaaaatttacttataatgcacttaccaattattatttcttccattttgtcatggttatccttgtattatctgaaacgagttgttaagaaccaattatgggaccaagaatttaatacttcatgaaactttataatcaaagaatagactacaaagtattccttctgtctttgcaaaccatacaaaatgataatagaacagtatcatctttaggatcaaagacccaaataggcattggtgtgtcatttagttgcatatgtcttaaatcaaattttaaaacaaatttaggcatcatctctcaaaatctttgcttctgtatattaatcccattgttttggaaaaaatgtatattttttacaaatcatactctgtttactggtggctcaaaaactttttagcttacatagtagttgaaaagagaatcattttttctgcagatttttgctcatctgtgtgtaatttaaaactgaaacatattaattttcttaggttttcttagtgaaatgttacatgcaaatgatgtataattatcttgtaactatccatgcagttacattttatttgctctcaatttttaatacattagtaataaatgtacactgtggaaaaaataaagttataaactttatctgtaaacctaccacccaccggtaaccccagccaataatcttagtttatatactttcaggcattatattattgttattattagtaaacctgtctcatctgtctctatcttcttaaaattgcatatttatatctatagataagtccacctttatctagaatagaggattatactctgtatattatttttaacttgattttcaattcaagctgtattatgaatatatttctctatttatatttataaatgttagcctttttttttttaggaattggaacatcttaaaccactctcttgcttttgggcatttaatttgtttccttctcttcagtattatcaacaccccattattaaaacagaaaatctttatcaagcagctttaaaaacatattctcggacaggcacggtggctcacgcctgtaaacctagcactttgggaggccgaggcgggtggatcacgaggtcaggagatggagaccatcctggctaacatggtgaaaccccgtctctactaaaaatacaaaacaaattagccgggcgtggtggcaggtgcctgtagttccagctactcgggaggttgaggcaggagaatggtgtgaacctgggaggtggagcttgcagtgagccaagattgcgccactgcactccagcctgggcgacagagtgagactccgtctcaaaaaaaaaaaaaaagtattctcctaaattctcagtggaatttctgggtcctgtggaatgtatacatatgttgctcctcctaaaaggagtggataaactcctctcctacaagcagtgttctgcactggccctttctacaaattcctttcaccctggtattatcataatctaaaaaataataatttgagaatcaaaaaataacagctatgcttgttttcttcaggaaaacagaacaggttatccatatatctgcagggtttttttctccacaaaagaaaggccagccattttcaataacaagtagtttggcaggaccagaaccattccattgggtcactggtaaaatttgtctttggctttaaacattaaggcagccaggactgtgtctttggacattgatacagcatttagtccagtcttatttacaattaggctttttgataatggcttttgggctgacgttaagtataaaatctgaaattagattttttaaagattataatcaaaaagcaaaaatgtcttcctagaaatagcaaaggaatgcttttgctggatttgctccactaactcatgtaggcaatataccaaactcaaacagccagcagttgttttgtaaaagacaaactgcatctgaaatcagtatgacaggaccacagtttccatctcatcacttccaccaacttacatttaagaaagcacaacttgaataataaaaaccaccatagagtaaacaaattcttcaatgagaatgctttgaagtcaagagaaaaataggctcagggcattgtgttacagcaaaattttgcctttggcaaaagttttacgatggaatagggtttttaaaatattgggaatcaggtaaattgcatggctaattgaactggggaagacagcttaatgagctcatttctctccttcaaatccaagaagtcagaaggcaagttttcatctattctttcatttatccaattagaacatatcgtccccacacatagggctactagaagaagtaatagttatgtctgatggctcttaggaagtattgtcaatagataggacctcctctgtagttataactacagatgatcaaattaaccagaaataaattttggtcataaatttcttcttgctccactctgtaggctacctcctccaaagcagatcgtagaccagtgcatttataaatcacagaatcaccttttaatggttatagactatatatagcatagtgacagtcatatactgctggtgctggtcaaacttgagatcaacaattctgttggatttttacccctctcttccttctttttcctcctcttccatattctgactttcaggtttgagcatgtaataacttccaggatttgttttgggcattatttatatattaccacttatcctaagattattttgagtcagataaaagtaagacattctattaagttatcttcattttgaagatgaagaaactaagattcatagaagtaaagaggactctaggagtaactaactgtccattgtcattgttaatgttacttaacctctttaatcctctgtcgtgaatccaataacgatcaaagtagtaggcaagtttgctgagggccaactgtgtgacaagcactttgataactgattggtctttacagcaaccttatgagagaagtattattactctcatattatgagtgagaaaaataaggattaaagaggtacaggcaattactcaagaacacagggctagcaaatcaagaaacagaagttagatgtgagatattgtatcacccaggcctaaaagatgcaatgaaacaacccattttaaatgtttaatatagtaaccagagtatactctcatttgatgagagtatactcatcaaatgagagtatgcatttgatgttacttttcacagtggcctttttgcagttaggaaacagcagcaccaataatagaactaagctgtctgactcccagcctgtacctaaatctctaacttttgattttatgaaataaatttgatttgcagatgggcattgctggtgagggaaatgtaaagaggtcaatttccccactttaaatttttttggctaaagacccatagctgacaatattttaatggttgccacatattcttcttttatgaagtgagtttcattttatatttgtaagtggtttttattgcaaatcatcacctaacagtcaattctgaagactttccataaatgtcaccttgtttgtgaattgttctcattctgtctcctctctaaattccctcaagaacaactttctttggacattaatatcattattaattgtgaattgtcagctaacagcttagcaattgtctatcatgctcctaatgcatggatgatacagagaatataaagtcaataacttgtatttcctgaaagatacatatacagaagccaatcatttcagtagagtgacaggagcaagattgaggtattaatagagtactctgagagatgagaagcgggacaactaccttagcctaaaggtttgcaaatgattgtggggaaaaataatctttatcactccaaaaagaatattacagtgatattttaattgaccatagagtttaacttgaccattgtaaaatgaccaaaagggtgaattattttttaccaattattaaaaagtagcactacctgatataaacagtgtgacctaatgtttacattcttattattttttctcctttttgtctttttctctctccccagctaagtagaaaaaactcactttgttttcatgctaaaattttggaataccattaaacagcaacacactggacaactacattcttatgttttatcttctccctttaagattgttaaaggaagaaattgaactagtggggaaaagtaaatactggccaaaaaaaaatgcttttgactagtgtatgttccaatgatgattatgaaatatgtcaaactgttctaaaatactaaatatgtgttactatttattctgtattaaaatagaacaatagaataacctttgttgtcccaatatgaaaatagtttttaacaatgttaatataaaacaaagagcaaaggaccattatcttggataaacagagagacattactttacatggtttgactcccctgattcataatttaacatgtaactctggcatatgctgggcacttagggaagtcacattaagtatttcacagcaaatggagagtgagaaaaatgattttcagaaatcctggtatttacttattataaatcttgtcttgaatttattgtactttacatgaaatataatttgataaaatgtaattggtttcagtgtgtatgcaaaatgagaattttctgatcattcagatatcaaaattaactttataaatacaaatacatataattacctattaaaattctaaggtgtatttattttaataaaagtctttatcaaacctagataaatctcatttatgattataaatgtaaaactcctaaatttttttttacttggctttatttactattaatgatgttgggtttattaaaaaatgcaagcacagactccaattagcctactaacctattgtataatttatcaattcaataggtcaaacaattaaatcagaacatttaataaaattgacaatatttttttatttttttacaaaaatccatattggttgttttgaagtagcaatttcttcttcaaaatgataaaaattgtctatgtaaaatcaatagtcaatactataaaagctgcaacattatagacattttcattaaaatgagtaaaaagataattatgcctatcacactactataccatataaattaactattatgctgaaaattctggccaataaagtaggggaaggaaataaatataactgtatatttaaaattatgaactaaatcttcactgttttacaggcaaaggaaaattctaatatctgataaaatctttaaagtcaattaaaaaagagtatactaaagaaaaatgaataattttctcaaaaaggactatatctaaccaagaactaggtgaagattggcattactagtatccaaagacataaatactaaaacagtaattgacatattatctaaaatcaaaatagtgaagatataacaattatgggcagaacacaagaaaatggacattctcagatattgctggtgtgagtatgagtttaatttttctagaaggaatttgaccatatttaacaaaatctttaaaatgtttatactctttgataatgtaatttcatctcataattttcttaaggtaatacttagatatatatccactcccgatccccaaaataaaatggaaaaaaaaaaactaaatgtgtaatgattgcagaagggttgaatgttattttatgagaaatataagaaataatgcagcaaaatacatgatgtttaattatacaaaactatgtagtaatacaaaatatatgatttttaataacacaatacccatgtatattcataattttgaaaagaagaaatatatgcatatacaaatttgaaagaaattatctcatgttgacattttgacttatcatttgctagtcaaattaccagtgcttttaattttctacctcctgcctttgttttataaagaatatttttattatgtctatagttatactaaactcagttcagttgaattgttatttaaatctatggaaaaaattttgctttgtccataaattgtatttatattagaaagttaaaataattaattataaaacatatatccaggtttttttatttgttccagtacataacagacctattacataatttgagtaaattttgtcttacagttatacaggcagttctctccttacacaattctgatatgcatgaatatcagttatcatagtttagttaaatgctaacagtcctccaacaacgtaactcaagtgttgggtaacattgaatattactgtgagtaattacataaacaaacattgctgctggctctgcagtccacaaattaccacataaaataacagatgcacattgtgatcagtgaccgatcacgtttatttttttcagtatctgttggtgattgcgcactacacatttatcattcagtttatttatagaagagaagcgtgtggttgtgttgcctccttgtgagtgataaacccgagtgacactttacaaacacagatattcaaaaaagaagaggaattggacagcaaagaggaaagcactgcaaagaaagaaaatacttgaagtaaaattcagattgaacctaagtggagtcatagaagaaatagtcactactgaggtttgagagattctgaatacgtagccagagctacttagtgaaggtgaacttaacataagtgagggaagtgcttgccacaaatagggtgaagatgtcctggaggaagtgacacccaaacacttcacattagaggaattctcacaggtacttcacaacactaaaagcataaaagttaaaatgttggaagctgattcaaacttagaaaggagcgtgacaattcaccaaggcatagaaaagaagtggccgggtgcggtggctcacgcctgtaatcccagcactttgggcggccgaggtgggcagaacacgaggtcaggagatcgagaccatgctggctaacagggtgaaaccccgtctctactaaaaatacaaaaaattagccaagcgtggtggcgggcgcctgtagtctcagctacttgggaggctgaggcgggagaatcgcttgaacccgtgaggcggagcttgcagtgggcagagatcatgccactgcactccagcctggggaacagagtgagactccatctcaaaaaaaaaaaaaaaaaaaaagatgcttgtgttcagtgtgataagttataggtgagatgaaggcaagcactgttcaaagtacttttagtgagtattttacaaaggactaaaacaacttctccaagtttttaatgttttaaattacagagtactaaataaatggtcatttttactggtttatttctttacatttataaccagcattggagagttgttaacatgttgaagttttacaaagtcttagagctatcataacctttcctgttgattattaagatcactttgcatgtttgtaacacaaaggttaaacacttgaggggatagatgtcgcattttccaagatgtgatgattacacgttgtatctctttttcaaaacatcccatgtagcctataaatacatacacctactacgtacccacaaaaattaaaaattaagaaaaaaaaagatcattttccatggttcaagtttgcatggtcacttttacaattccaccctaccatgcccgtaaatatgctatttctgacttacgaaatatttttcaaataaaatcattgctgacttttaactcactgatatgtgctttacttctggtgaaaggcctaacatatcaataaaatgaaagaaaatcacagctttattttctttactgttctgatattttttgttctagtgtgatcgctgcttgcctctttataatgacaagcctttccgccaaggtgatcaagtttacgctttcaattgtaaaccttgtcaatgcaacagccattccaaaagctgccattacaacatctctgtagacccatttccttttgagcacttcagagggggaggaggagtttgtgatgattgtgagcataacactacaggtaagtagcaaataaattcctgagttggtttggaggcctgtgtgcttctatctacaatgcatattattttaaattatgttattgctatcttatttaaggatgtactttcatacctttaagtttgaaaatcaaagctagttcaccaaatcttcctatttccaaatcactaggtagttttcagaaatagcactctagtcttaaactatatcttttcaggaaaaggattttgttgttgttgttttgttttgttttgttttttaaagagttcacaccatttgactaaaccacaaccatatttagaataactcgggaatgcttactttgaacacatatccttaaagtaagtttccttttgtcccctttattgtcctttatgtctggattctcatgtggagatggcattcattcagatttggcatggacactggtagtctgagaatactctttttgaaaatactaattaaatggagacgatgataatcaaagtcctgttctaaaactacaaagcctttgactagtcattgaaaaataccatccttattttgaaaggcaagaaatggccaacatctgaatttgtgaaatataatagcatatatctgatgggtttcaaagtggtactcttaagcatgaatccatttatcggctgattattgataacttaaatatcacaagatcttgggtaggtgctggggacatgaagatgaataagacaatgaattttctgtctttgggttattgtacagtgggaaagacagactattgaaaggaatgattacaaagttgtctgatgattgctaagatagggcaaggacagtaggagttaaccagttgaaagattaggatggtgaactaaggcttacaattagggaaacattttgtgcagtggcctagaggagggagaaaaatgacacgtttgaaaaaccataagatgggcaaatggctggtggtaagagatattaggaaggaaggcaggacaatatcatagaggactctggagccatgataaagcctttggcttttatctaaggtcaaggagatgacacttaagggttttatatgggaaaggggcataatgagttacttgttattaaaagatacacctggttataaagtaaaaaatggattggagaaggttagagtggttggggaaaactagttagtgaggtgctgcaatagtccaggtgagaaataatgtcagaatacatttcagatggtacggatagagagaaatggatccaagagatatttaggataaaaaagtgagtgttttgtgagcagagtgtaggcaagggaaggaaggagagccaagactgatacctaacattacattctagcttgagcagtaggctcaacattggtgccagccattgagatagaaaatacaggaggattgagatgagggaggagatggcaagttctgttgtggatatgttcactcggtttctaagagacataggagaaactcctgggggcagttggaaacacagttctgaagctctttccttcaaggaaatcctctcatgatgctttagagaagatcagaatcacttacacatgttagtgacaactatgcttatcatggtttataaatgtgtattactcctggtattatttagttcagattcctcttacctcctagactgtaagagagctttgtgaaagagatgcaatgggtattgtgtatttagtttactactgtattacacagcacttagcacagtatttggtacatagtaatcacgcgataaatattcattaattcataaataaaagagagatttctggattggagatatggatttgggagtcaacagcatatgtaaatggaaatagtctagaaatattataaatcaatttaatttttaactagctcaatagccaatatctatcagaatatgagttttcatattattgattattgattatttctgtagtcttcaaatattggagaaatttcaatattttttgagcaaagtacatcatgtttaaagggggaattgatagtcttgagttctacttcagcttatttcaattatcttatacactagtcacgttcactttaaaaattccttgtagtttaggttttttattacataatatagcaaaggaaatttgtaattataaattataaactatgggaattacctgatatatctaatatgtcaggctattctagtatttagtatgaaaagtacttggtatctctaaatataatgaatttctatttcaatctttgaaatgaaaaataatggccactaacataatcatttgtttttaattgtgttaactacagaataataaattatattaagagaagtctcccattttacatgattgagttctagaaaaatatttccaatactacatacctgcttgcttcttactgtataagtatcatctaccacatatgtagaaatttctcctgctgtattgagtttagataaagtgcctggccccagatataaagttttaagtttaggagcaaactctttccaaatgtatgggcccctataaagcacagctttttagaagtgtggtattatataacagatgggagtttaatgaagtaaagcacagtttgtaacaggttcattgtttcatatgctctggatcactaaattggcaggtagagatgaaaggtgcattaaaacggacgttccgaaaattatagaattccctcaaaggaatacagtctttaattttgaattatgcagctgattttaatgaattagaagtcataatgcataacctttccctgatgcaggaaggaactgtgagctgtgcaaggattactttttccgacaagttggtgcagatccttcggccatagatgtttgcaaaccctgtgactgtgatacagttggcactagaaatggtagcattctttgtgatcaggtgagtttttctgagtatttaaggtaaaggattactctgtctgccagaaacttatttggatgttattccactagtagaattgaagactgcatttgccaggaaatcctctatgtgcatttgcatttcaaagagatggttgttcgtgtgcaactttgagtatggacatgaaatatagcactagttcggtggtcctttgcatataaaaaggcttattttagttttaattttacaaatgtcaaaaaatcgaagggtaggggttctaagtaaattggggtatatgtcttggaattattggtgaattaatattaatacatgatataaataaacaagaatagtttctccaaaaattccatagaagatcatatagcaaaagtcacttacacttagggccaaatggaaattatgatagcctcgcttctcaatttcttagtctaactttccctcttaaaagtacaatggattttttataattttaaaactttctgtttacttacatcacaaatatcgatgtctagcctacatgcacacagattctaactaacctcagttcatgtatcctacctcaagcaggaaaacaggcttcttattgaagctgaagtttttcctgttctgataatactaataagtgaaaattgtgaaaatcggtaaaggagaaatttactttgaagaatcaattcaatgattgtattaattttaaacagttatatactctgttatgaataaataaggctaggagcataaaccacaatccagttatagaatatttgttaaaaagttatattgtgaacataatacacacaagacaaaatatctttctcctataattttgagaattcattaaaaattgctttcccaaataaaagacaaatataaaccaagacaaaatatggattcaaagaccttcagagtaaccatcatgtgtcaataagggggcattacatgcttcattagaaagctgaagagtagaaaaattattaataaagacaatttctactatttttattttataatattgagggactattttctcagaaagtcatactacagttttccatatattaattagtaaactctgactgtatctttagattatatttcatttttacacatccaccctgagttttcagcatggctatcttttgcttatcattcaaatattgatatatcatattttgagatatctttgctgaccacccaattacaaaacattctcaagtctttcatatcaccatgttactctcattacaggctctgtaaaattaatttatttgtttacttttcttcttctctctttccaacataaacagaacagtttcgatcatataaaaagcccccaataagtatttgtcacataaatgttgaatgaataaagagagattatctgagcactgatcttatagttagattgttattttaaacggtcattacaataatctgagcattatgtaaattttcacttgcagaacagtttttctccctgaaaatctaaggtcaagagctttgttatatagtataggaagactgtaaactatagttttacctcccagaatctcagttacgtgtctaacctacacgagttacagtgcatcagatttgtctctccatttcaccattcagatctacaagaaattgaaacctgatttttctgaactcaaacttctatttcaagtccgttttatagggatgctagacaaccttgggtggttctgtgcttgtaaataattaacaactgactaagaaaaaaaaaaggccaccataatcaatttcaatctaccagtgagatgtcactgaacatggatttcagaagaaatgtacttaatctgctcttatgagccagtgcagtgtactccagcatactactggctctagatttctttcttaacatcttataaagtggagctaattattggatggaattatgaaagactgtaccatttataagcaggatattagctgtagatagtgttattttttaagttggagaaatttttctctattcctagtttttctgagagtggtttttatgaatggtgttgaattttgtcagctgctatttctgcatcaattattatgatcatgtgatctttttttctttagtttgttagtgaagtagaatacattggttgcctttcaaatgttgaaccagcattgcatccctggaataaaaccacctttgtgtgtgtctttgtgtgtaattcttttcatatattgttaaattttatttgctaaaattttgctaaggattttacatctgtattcataagaaatattgctctatggttttgtttttataaattgtgtttgtttcattttgttattaggataatactctcgtaaaatgaattataaaatcttccttcctgttgtttttctataagaaatgcagaactggtgttaattactctttaaagtttaccccattctaatacatagtattctagtaaatacagtaccccatgtattagtccatttttgtactgctgggaagaaatacccaagacagagtaagttgtaaagaaaaataggtttttatttatttatttatttatttatttagagacagagtctcgctctgtcacccaggctggagtgcagtggctcaatcttggctcactgccacctccacctctggggttcaagctattctcctgcctcggcctcctgaacagctaggattgcagatgctcaccaccatgcctggctaatttttttcttttttttgtatttttagtagagacagagtttcaccatgttggctagactggtgtcaaatcccacccacctcagcctcccaaagtgctaggattacaggcatgagccaccacacctggccagaagaatagatttaatggacttacaattctacgtggctgggaaggcctcacaatcatggctgaaagcaaaggagaagcaaaggcatgtcttacatggcagcaggcaagagagaagtgccgagtgaggaacagggaaagccccttttgaaaccatcagatttcatgagaactaattcactatcattagaacagaatgggggaaactgcccccatgattcaattatctccacctggttcctcccacaacacatggggattatgggaactacaattcaagatgagatttgggttgggacacagccaaactcacacttggcccctcccaaatctcatgttctcaccattcaaaacaaaatcatgcccttccaagagtcccccacagtgttaactcattccagcattaactcaaaagttcaagtccaaagtctcatctgaggcaaggcatgtcccttctgcctacaagcctgtaaaagcaaaagcaagttagttacttcctagatacaatagcggtacaggcaatgggtaactacacacattccaaataggagaaattggccaaagcaaagggcctacagtccccatgcaagtctgaaacccaatggggcagtcattaaacctcaaagttaccaaatgatctcctttgactccatatcttacatccagggcatgctgatgcaagaggtagctcccacagccttgggcagctcggcccctgtggctttgctgggtacagccctccttctggctcctttcacaggctggcattgagtgtctgtggcttttccaggcacacgatgcaaggtgttggtggatctaccattctgaggtctggaggatggtggcccccttctcacagattcaccaggcagtaccccagtggggactctgtgtggggggtctgaccccacatttcccttccacactaccttagcagaggtacttcattcattagggctctgcccctgcagcacatcctctgcctggacatccaggcatttccatacatcctctgaaagctaggcggaagttcccaaacctcaattcttgtcttctgcacacctgcaggcccaacaccatgtggaagctgccaaggcttggagctgccattctctgatgcaatagtctgagctgtatgttgatcccttttagccatagctggagcagttgggacacggcaccaagtccctagactgcacacagtgggggggccctgggcccatgggaccattttttcctcctaggcctccaggcctgtgatgggaggggtgatgagacatgtcctggagacactttcccccattgtcttggtgattaacatttggcttcttgttagttatgcaaatttctgcagccaacttgaatttctctccggaaaatgtgttttgcttttctactgcattgtcagcctgcaaatttttcaaacttttatgctctgcttcctctttaacacttactacttagacatttcttccactagataccctaaatcatctctttcaagttcaaagctctgcagatctccaggggaggggcaaaatgccaccagcctctttgcatagcaagaatgacctttactccagttccccacaagttacttatctccagctgagaccacctcagcctggcctttattgtccatatcactatcagcattttggtcaaagccattcaacaagtctccaggaagttccaaactttcccacatctttctgtcttctgagccctccaatctctttcaaactttcccacattttcctaccttcttctgagccctcccaactgttccagcctctgcctgttacccagtcccaaagttgcttccacttttttgggtgtctttacagcagcgccccactacccagtactgatttattgtattagtccattctcactcaactataagaacaaacctgagactgggtaatttataaaggaaggatgttaattgacttatagttcctcagggcgggggaggcctcagtaaacttacaatcatggcagaaggggaaacaaacacatccttcttcacatggtgacagcaaggagaagtgccaagtgagggtgggggaaagttccttataaaaccatcagatcatgtgagaactcactatcagaagaataggatgggagaaactgcccctcatgattcaattatctccacctggttcctcccatgacatggggattatgggaactacaattcaagatgagatttgggtggggacacagcgaacacatattgctccagtaaaactatctcagatttctttggaaacagaaataatttattattaattcaaaattaaatactacatatatatgtacatatatgtgtgtatatatgtatatatatagagagagaaagacagagagagagatacaaggaaatgagagtcatattaacatcattaggaatttaatattactagaagacagttcagaataaccttaaaatcccaaaagaagacattttgaagaaaaacttgatactcagttctatccaagctatggcaccaacatgaggttaagattctttttgtacgagagatggtcaaaacattaccattcataaccccatattaaaatattcaatatgcaaagtgaaaaaggaatgtaagactggggacaacattaaacaaaggaaatgacaaacaattatgatccaaagaaataaatacataagtcaaaaaatattttcaaagtatccattggtctttatggtctgcaaggatagtttccttacatacatgtttagtaattcaattttatttaagatcaaatcacaattttttgtgatttgagataaacaaataacaagtagagggctaaaaatactatatccaaatatttcagtgagaaactggatgcttttttcctaagatcaaaagcaagataacaatatcccataacattgtactgaaagttgtagccaagaaaatgaaataaaagacattgagactggaaaaagagaagttatttgtatttgcatatgccattatcttatagatagaaaatcctaaggaattaattcaaaagtattaaaactaataaattcaggctgggcgcggtggctcatgcctgtaatcccagcactttgggaagccgaggcgggtggatcacgaggtcagcagatggagaccatcctggctaacatggtgaaaccccatctctattacaaatacaaaaacaaaattagctgggcatggtggtgggtgcctgtagtcccagctactggggaggctgaggtgggagaatggtgtgaacctgggaggtggagcttgcagtgagctgagatcatgccactgcactccagcctgggcgacagaacgagactacatctaacaacaacaacagaaaaaaacctaataaattcagcaaggttgcagagtacaatatcaatacacaaagatcaattatatttccatatatttgcactgaacaatctgaaaataaaattaagaaaacgtcttttaaaaatcaccaaaagattaaaatatttagaaaaacatttagtaaaagaagtgtaaaattatattctgaaaaccataaaacattgctgaaataaagaagaactaaataaatagaatgacacccaatgctcatgtatcagaagacttaatattattaaattaacaacactctccaattgatctacagatttagtgtaatctttgttaaatgcccaccttacttctttgcagacattgaccatatgatcctaaagtttgtatgaaattcatgggactcaaaaatgtccaagataaccttataaaaaaagagttggaaaactcacccttcccaatttcaaaatttactataatcaagacagcatggtactgggataaagatagacatagagacatattcactgaaatagaattgagaatttacaaataagccctcatatttatagtcaattgatttttgacaacagtgccaagacagttcagtggagaaagtgtagtcgttttaacaaatggtcctgggacaattgtgtttttatatgcaaaagaatgaacttggactcctaccccacctcacatataaacaaattaattcaaattaaacaaaatattgaatataaaagctaaaattataaaatcttgagaagaaaatgtagatgcaaatcttcatgtcctcggattagccagtggctttttagatatgacaccaaacgcctaagaaacagaagataaaatgtgtaagttggacttcattagaattaatatttcaaagcacaccaacaagaaagtgaaataaacaacccaaagaattagttgcaaagtatataataaatctgtaataatgaagaaaatatttgcacagcatatatctgataagaagcttgtctagtatatatgaagaacttgaagtgaataatcaaaagacaaataactcaattttaaaatgcgcaaataatctgaatagatatttctctaaggaagatataaaattaccagcaagcacataaaaagatttttgacattagtcatcagggaaatgcaaatcaaaactactgtgcaagcccacttcccaaccagtgggatgactgcaactcaaaaaaaaaaaaaaaaaaaaaacagacaaaaacaaaatttggtgaggatgtggagaaattggagtcttctcataggctgcctgtgagaatgtaaaatgtgcaccgactttggaaaatggcttagtgtttctcaaaatattaaagatggaattaccatataacccagaagtttcactcctctgtatgtatcatatatcctcataaaatcttattggtgaatgtcaatgccacattgtttgtaatagtcagaatgtccatcaactgctgaatgaatagataaaatgtagtataatcacacaatggaatattattttacattaaaaagaaagaaattactggtacctgctacaaaatgtgctcaagtctcagaaattagagtagggaaaggaagacggacgaagaatagagaaagcttgttttgttttgtttccaagtgcaaaaatctgttttaaaaatatatggaaggaaagacatgctttaaaatgttaacttttttggttttaaaaacatttttccttttatataaacttttttctctttccaaatctgctttatttataacttttatagtcagaaaaaaaggagaattttcattcaacctgatatatagccagagagaattacacataagaataggaatgtaaataagaatgatagaactgttttctgactttaaacccccacattgtttatctttaaatcacattcatatattatcttaatttttattattttctcatgctccaagtatagagacaaagtttatggagtatcgttacatgtggagatattgtgtcaagtctaccttacctaaataatgttataaaagatttcaaaaaatgtttccagacattgtcaataggataacagaacacacacttaaaaagttgtcaacagtgtcagaattataaactgcaaaattgaattcaaggacatttaaaaaattcatgcaatttcaatccttaataatattagggagcacacaaggaaattaggcagtagttcaagtctcattttgttataataacttaggaatgaagccagccccaaatggcctgagtgactgtgtcgtgcgctctatgttctggaagggaactttccctttggcacttgtcatttgaaactcaatccaatctcataagatatggcatgtttgccttattcttccataagaaatgttgtaattcttccttatgtgaatgccaaaatcttgagaggggcataaagtaatgctctgagtcactgaatcctaaaaatactgatgccacagtcaagacagagagaacatctaaagcacagtactaatattaataggagagaggaaaatgaagagtaataatgattattgaggaataactaacatggaatccttggatcccttgggttactatatgagtgtatattttatgtctgtataaattgagtaggatacaatttatgtctgtgtcatacaactgtaagtctgtgtatttttccttttttttttcttttgtctgtatttttgagggtgagagctttcagtactttcatcagatccaaaagggatacatgaaccaaaaaagatgataattatttcaccatggaaaagaagtctatcttatgaacaggctgggttattagttcaggtacatattatgtgagtttttcaggataccactgcacttccttcttgtttgcttgaacttaatgcatgaattacttgacatgcatcctgagttggaggttaactgtccttttccatttcctcatctagtgtgacttaagttcagatcaatcaaatagagtcccaggcctagatgatgcctcttctgtactttgacatatctggagaagggtctgtgaatccacacctaaagtgcatacatctagagatctcagtctgatcctgacccaaggtgggagtgagccgcttgtctccatcctttccctccactgaccccactcctccacatattttctggtagccccagagtccctgctatagccacctccacaggtgatggtgataaggtagggagaccggtgaaagtccctaacataagtccctagcatatggcctgactcatgtagaatgcattcaagaaatattgtctgagtgctttcttgcttgggacttttttcatccctgctaccttctctcccgtttactttgcttgttattgggttgagctgaggaagccatgggggttcagccactgtagtcaagatggtggtcatcagctagggtagtcctcaaacttttaatgcacatgtgactatcctaggtatctttttaaaagacagattctcattcaggaagtttggggttggggctcagattttacatgtgtaaaagttcccagatgatacaattgccgcctgtctgtgaaccactttttgataaccaaggagttagaacactgtatatcaaagatatgtagaccaaagaagctgaatgtagatgggggtaggggagttgtgagtgtgtactcacgagcacatgtatactcttggtcagttgtgggtttactttgctccatcctctgaatcccatcttaaaagcaaggattttccaagtcatccaaattaagttaggcttgaattgtgccctgggctctacctttaaaattagagtatatcacctaatagccatttttaaaaggaaataaaaacaacaaataagggaattaaaaagttgtgtgaaaaccaaaaatatagttgtaattatataaaaagagagaatagcagattgtaatgctcaataaagcatcaataggttactgtaatagcaacagaacagaaataaatgattaagagatatttaaaaatagattaataagaaaggaaactgaggttgaaatgaattagacgaaatggaaaggcatcagtgaaagaagcatttctaggtctgacctatggaagatggaataataaggaacagagaccctactcatgaaaattgattgttctggtgaagtgataattttcaaaacaatacatttaaaatttgaacagaatatactttctctgcataatgtaccatttttctgcagttcattaatggtttctcttctgttcagaattaggtatttgtcattaattaccataacatgtccaaaagtcatcaggtgaacttccctgaagtatattcttatattttgtatgactcaaatattaaagtgtacaaatagaaaaaataagtattgcataagtttccttagcttatgagaaacctgaccatgaatagtatgatccatggatattggatgtatacattgaggtggtgaaggatgtgaaaagaggagagttttcccagagcttcaatagagacagaaaggtcttggcacaagccacgtggtctctccttcagagaattagggaagtttagtagtaatatttctcatagagctggtaaattgagtaatatctcattattctgagattgtagaggatgagattcacaaagacaggaacaaaggtcctggggtataaatgggaaaagaagggaaaaattaatcttagctggataggaaggttagtattgagggagttatccaagaatcaaggttgtgacaaactgcctgaaagtaaaaatagatggagttgtaactgagatgaggtcttagcctccagtttatgttgagttccacatgtttgaatacatctgacatctttttgggaacaagctcatcacaagggcccaggtatacaaaattggccaaataccaatacctcaggcatttaaggctagattcaatagccctaaatagccataatagcactagcagaagcattaggtagtgtctggatattggaagaactgatttaactagtaagtgcaagataatgtgatacaaggcccattgccttgctaccaatagcaatgtagttagaataggctaaacagatgtaacaaacccccaaatatctagtggccaaaacaatatacaggctcatttgttgctcatataacctctccaagacagctgttcctacctccttgttggatcttctctttgtgacaattcagggacacatgctccttccattgcctggatatgcctttaactagggaaggaaaagacaatgtggaaaacaacttccacttttaaaatgctttggtccaaaagaggtgtgtgtcgcttctgctatcattgccattgatgatagctagtcacattgctaactagttatatagaaggctgaagacatgtagtctctagctgggtaaccactttgcagctacatttgtgtactattgaagactagggagaatgagtcttgatggggagcatgtcatctctgcttaatactcatgcaacagaaggtagcccaagagcgaaaggggcattctcttcttttctacacacagaacaggataacttctgtttaatgaggacctctgagaatagagtaccccatgagcatctcaggggtgccaagccattaatattggtgggactacctgcttggaggtggaccctgtaatattggtagatgcacctgtgaaagcacatatcatagcagcatgtatcagcaagagagaattggacataggaggagaaacagcttgtgtgcaaggttaaaagatttgttcatgagcacatgtgagagagaagccccaggaacaaggaaatgagaaaacaattactgcctcctacatgttcccagaggagggggctgggagagcaattaagcataaagagcattaattgcatagaagatgctgagggatcatagatttgaaagcaatttcaaaatatgagtattttaagacttttagcaagaacagacaccataggctgtatatagtttcctggagttatgattaaaggatgaaaacaacttttgtttagatatgtaggtaggtaagtaggtagatatagatagatatgagaatagtaagtttgtttaaacaaattattcattacatcatagtgacccttagtgctttttgatgatactgactgatatggtttggctgtgtccctacccaaatctcatctaatagctcccataattcccacgtgttgtgggagcaacctggtgggagatgattgaatcatgggggcaggtctttcctgtgctgttcttgtgataatgaatgagtctcatgagatctgatggttttaaaaatgggagtttacctgcacaagctttctctgcctgctgccatccatgtaagaggtgacttgctcctccttgccttctgccatgattgtgaggcctccccagccatatggaactgtaagtccaacaaacccccttcttttgtaaattgcccagtctcaggtatgtctttatcaccagcgtgaaaacagacgagtacactggcttattgaggaacagaatataatcagcctccttcattcctcactcactaaaccaatgtgctgatcatttctagaggcaaggacactccaagaatcaagaaagagccgatgatgaggctttctattattctcctggactggacgttgtctcagcttctgctgggccatagaaccctgcctctaccttgacttacccacatgttgttttggtgccaagtattgagtgctgcattttggggtgtacaagacagattggcatattgctaaaaatgtgcgaggacagaaatgacagaaactagtctgtaagattctcataggttccacttgtcttgcactcgtcatgtacaaaaatatgccaagcattgtagttcattaattcagtccttaccaaagctggtaaagcagttattaatttatccactgtaaagttgaggacatccagccttttggaaattaaataactcctccaatatcacacaagtaataaggaggttgtgcagaaattgaaaacttgtgaatttccaaagctcatgcccagctggaggttagagacatagggttcctaccaaaaatgtgttcctagcactcagcatagtgttcagcacttaagaggaaacctacagcagattgctaaactgggtatttacttacactatccaaaagtaggaaggaaacatacccatttgtttgtgaattattgtatcaaatcctattaatttcatcctaaatattaaataaaattcctaaataggaaatagcaatgttcatataaagaagcagcaaattaatttattggaatcgacacattcctcaaatggagatttggttgatattagagacttaatgtacctcccttagtgcttaatgtataacagagattccacttatcttacctatataacctaagaaatttgaatattttataaagttactttttagaaaacctgatttatttgttttccttgtcatctcagatggataccttcctctcaaaatctatttggaatttatattttcaagtattcaattaactaacatattaagcaggcattctcctgtgtaagttcctagcaacttttaccacttgtactaaaataaaacagatagttaagccaaatgagttaacttttctgaaagtgtatctttatacaacattaactatagacatggaaaatacatttattcacgttagaaataaatgcttctgtgagatctttcattttgataaagtcaaaacaccatcttattaataactactatattaattttgcagcaaattacaataagaccacactgtatagttgtgccattcagatgacatttatgaaatgctctaatttaacatggtgacatatattacctgcatcttttacacattatagcttatatcctctgagcgaaatagacctaaaccatccaaaaaaaaagagagagagagagagaataatgcaatgggaaattatacccctttgagaactagaaggactataattacattgcttcctcttaaaaccattcaaatatgtaaccattgctgggaacagcagtatgtggggaacctctttacactctttctgtcttgaacactcaaaagattgagaaaaaaatattcctttcctactatagttttatttgagcatgcttcagaattttacctttttgcacactccttagagattatcgtggggaagtttagaaagcagtttcttggaaatgccttttggaggggaagaggagctataaaaatataccagcctgacaaatgacaggcattgtagactggaaaagaaaagacatcttggttttacaccaatgtagaagcttttctttgcaaatgagtatttttgacagctgagcaagatgataaacagaagtatcacaaaacacttaaatggaaacaagtattatgatgtactttattcacctggcattctccaattcatgacatttatatgtggcagaacccactgcagattcatttatttatttttgaagtggaatgagttccttacgaaggtagcctgttacattaatgtggacttttcttctctagatgcagaagcttaaggaaaaaagttattgtatctgtactataaataagtggtaagtctcagaatccacatcttagggctgagaaggctcctagcaagtacaatatactgtataaatatagacaaataaatatagatatagattttttgtgtaagcaccggcagtgttgcaaatgattagatatttcataaatgccttttctaaaaaggtattgctgaaaccagtctatttctagaacttatattcagatgtttagaggtataaatgcttcaatattggctaagcttagaaaggctatgtttctctgaggctcagtgatagacataccaacaatttgatgagatgcatgactaagaagaaaaagagagtaagactgagtccctgtgaattgattgacttggtgcagtggcagagtaggtagcaagtattaaagcaatagttcttaaatgttagtgttcataagaatcatcaacagaactttttaaaaatgaagattcctaggttttaactttagcgacttttaattctttaggtctggtatatttggttgtgggaaatcaaaagactcaacttcggaatacactgaacagttgctgactatagatttgtatattcaaaattttttggtatttaaaaatggtatgtatggtttattgagtcaaatattttaaaaactatgaatgtgtgctggtttgtttttttttttttttctggattggaggacaatttggggtaagcattctctatttaacaagtcataattaactccctgccaaaactaagtagaaattgtgatttctataactcctatatttgataatatctcctaaaaatatttcagtgatatagcatttaattgcaaataattcatctagtcaccaaacaaatgtagggacgttcctatataccaggcactgtgcatatcaaggtgtatattacagtgaataacagaaacactcacgaagtgttcaattgaatttaaccttgaaatgtattatttattattattatgtttaaataaactatgtgaggtttttttttcattgccaatgagaaacccaccctaacttcagaatttttatctttaagtatatcctattttaaccacccttacccatccactctcaatgatttctcctcagtgtggggccttgccgtggaagtgtgccctggtcagtgagttttgagagtccgtggaagctagattgccctcggctcttcagttcccactgcagaactcttgcagtcactggctattggatcagcagaacctcttctattttcagtcgcccattttcaaattggctcactgaactttaggttctccagttttcaggtctttcaaaagtccgacacccctttactatcatctgctttctcctacacaggggctaatgccatgcaggttttgtgactgctggtggtgtgttcctacctgctttttttgggaggcttctgggcacagctggtcacctagtttcattataatcatttttaatggctttgctgttgttgtgttgctgtttagttctgtcagcttttatcctgggatttagagagacccaagagttctgtggccacataaccattgatcctgattcccctggagtctcttttgacttttactgcctaatttaagctgaacatatgaaatacatgaaaaaactgaaagctcaagctcgtttgttgtttgtcttcctaggttatggtttccatttctccctctttctcaacctattttgccaatcaatgtctatccttccttcactttttgcctactcactacaatattcaattacacaaacataatttttcctctgcccaccccagcaccagcatttttctgggagtttaagtctcttatgaatctgggaagaaaggaactaaaaatgagcagggatgaatagcaaaatgagtgagtcaacgagtagcaggcaggacattagagtgaagctgttttcttacccagaagactgatgatgggaaaggaaaaaagaacaattcaaaattagtagaagaaaagaaataattaataaaacatgagtggatattaatcaaatagaaattggacaaaaaatagtgaaaatgaacaaacgcaatagtttgtcctttgaaaaggttaataaagttgatgagcagaaaacacaaagtaccaacatcaaaaacacaaattaccaacatcagaaatttaaaaaagagacatcaatgtcgttgcacattttataaacattaaaaaattacagttttatgaacagctctgctaataaatctgatgtcctgaatgaaatgaacaaatgaacacaaaaccaacaacaaaaaatagaaatagcctcacatatattaaagacatttaattcatatctaaaaacctttcaacaaggaaaatctcagtcccaaatggcttcactaatgaatttgccactaacataaaggaataaataatattagtcctacacaaactctttcagaaaaccaaggaagggcatatatttctcagctcattttgtgagggctacctaactttaatcccataacctaacaaagcactaaaagaaaagcccattagaatattccatatgaacatagatgtaaaataccttaacagcatattagcaaatggaatcctgcaatatataatagggtaatgcatcatagctgattggatttctcccaggaatgcaaagttagtttaacatctgaaaatcagttaatgtagtaagccacataaatagaatacaaaagaattcccaggtaatcatctcaatagatcaaaaaactttgaaaaagaattcaaaacactttcatgataaataccctctgcctactaggaatacaagagaacttcctcaaactgaaaagggcatctgcaaaaaccctatagctaatattatgttaacaataaatgttaaattttttaccactacatcaggaacaaagcaaggaggtttgctcttataacttctactaaaaattgtaacagaagtctaaagtaggacaaaatgaaaaaacaaaaagccatgaatatcaagaaagaagtaagactattattatttgcagaaaatatgccactgtatagacagtgggagtataaaaattgcttggcaagcatcaagtcccccacatacaatcccctcctcacactactctccttcgtaaagccatgaaaaaccgctttatattctaagtaaggacgggatgtttgatgtgcaaatgcagctgtaagataaatccctgagcaacatttttggccaccctgcccttcctatagaaagtctggggctgtcactgaggtagggttagtaatggtatgtgagactggagagatatgtggaaaccacctcatggtatttggtcttcactagttaggcaatagggagctattgaatatttctgagcacaggagtgacacagaggtgtaccaagtaggtaagaggcagtggaaacaatctacctcagtggggaagagtattgtatcacaaaatttgtttagaattgctagtacttggtgataattaaaagcaaaacaattttaactgaatcttattattttaattttacttacagaaagtgcatcctcttttgtgtacccaggtgtttcattctcaccaccttaccgtaggattattatcatcagaattaaagtagatgaggcaaggcacagtggctcatgcctgtaatcctagcactttgggaggctgaggcgagaggactgcttaaggccaagagtttgagtttatggtaagctatgttcgtgccactgcactccagcctaggcagcagagtgagaccctgtctcttaaaaaaaaaaaaaaattggaatgaatgaaaattaattgatagcagtttattaaatggattagggagaggaacagactggtagatatcattcagtatacaatagctggttagtgatggcaattctgaaagaagaagtggtagaaactgggaggtgttgctagtgtagtatgacctttcaaaactcacagagtgcatagcttgtggatgtatagaacaatgtgaaagaataaattctccagaaaggaagaagaggagttagagattttataaaagagaagtctatgatgttctctaggaaagaaaagaattttctgaagaatatatgcattgattaaatgatttccttttgccctcatttatatttattttctgttcaaatgaaacacttaaactaacactcaatttccgggacagatttcctgttcttacattcttcaatttgctttttaaatttttactttgtttagcaatatcaacattgcctcattggcttttagtgagtttcttgagaagatgtaatctatagaacattagttcttctctcccaccagacagatgagtgcatagaaagacatatagttatactgctgctgttttaaaagtgttgcttcaaattacctaaaatatagtgactattagataatcactgataaaaactgtgttcatctaatttattcatcttgaaatcatgcttcatatttcctttaagcacaaaatagttatgttcacacatgcacaataaatcatatatggattacttgatgccttgaattcaccctcatagaattttatctcctaatgtaaagaaaactgactggggtaattattgcaggatcttactcttttctgttgtcagtaaccttcccaccaaactcattgtgacaattgtcacccggttgactgtgcatatccaccattgctccagagcctaggccagcagacttttgctgcatggtccaaaatggtgaggtcctgggtgtgatcacaaggcaatatgcagcaaacattagtgaccatcagtgctaacaaagaaacttacaaagtaacaacttgaccacttggccaattcttccactgtgttttcagctcttcacaggtgtaggccatgccttaaacttaattgagtctagcactcttcctgttactattattatatttgtagcttatgataagcagagtgaatttaacataggggttatgatcatgcatttgagagttgggccacttagtaactgtattagtccgttttcacactgctgataaagacatacctgagactgggtaatttatacaggaaaaatttatacaggacttacagttccacatggctggggaggcctcacgatcatggcagaaggcaaagaggagtaagtcacatcttgtatgggtggcagcaagcaaagagagagcttgtgcaggggaactcttgtttttaaaaccatcagatctcgtgagatttattcactatcatgagaacagcacaagaaagacctgctcccatgattcaattatttcccactgggtctccccccacaacacataggaattcaagatgagatttgggtgaggacacagccaaaccctattggtaactgcaccacctttaataagtaatttgatctttctaaggtttaaattcttcttctgtcaaatgaagattcatgtattttcacaaataataaaatgacgaaaattcctgccactatggagcttacattgtaaagtgatttggggagttggaagagaaagaacaatcaataaatataaaaataagtaagtttatttactaagttaaatgctataggagaaaactagacaaagtaaaatgccttgagagtaccatattaaggaaaggaattgcagttttggaaatgtagccaagagacttttaattgaaaagatggcatttcacttgagacctgaaggagatgaaggagttagtcatgtggaaatctggaagaagagacctaggcagaggcagcagcctatgcaaacaccataaggtggaagcacccctgatgtattcagaaaaggggctgtatagctgaagtgagcagaagaaagagtaggaatgtcccaagcctacgggatccttgtgcaagctgcaaataattggtcctttcactttgcaagtactgccccacatccatcaaatactttagaaggtttgaaaaaagtttgactatcaatcacttgatgaattttcctgcccactatttgctctataccagtgtgaaatgtacagagtaatacttccacttcatctttaccgagcacttactatgttccagagatgatgctaaacatgtttacattaataatctcagttaatcctgacaacagacctatgaggtagatattattatgctcattttattgataaatacgtgaagacttcagtagatttaagttgttcagagtatagttaattctgtggctagtaattgtggcacataatcctaatgttccaggaatttatatcatttagttgaggagacactcctcaactcctgtctcaggtgacaggagtaagtgaaattctaaggcacaatatagcatggtgcataagcaggcaggactgcagccacagaaccctcaattttaattcaggctaagtcacttactttcccttttatgttagagacgtctgttagtttttctacaggaagtataatacctcacagggtaatttattcacaaatacgaaaacatgtataaaacatcatagcagtctgcctgcaatatcgtaagtgttcaaaagggttgtggatattattattgttgttgtaagctaaggaacgctagaaaaacatcaaagattcaattactcaaaataacttttgctgagcatctactacatgtaaaatatgtatactgtgggatcaatggatgatgtaaaggtgcaaaaggttctggcccttggggagtgtatggtacactgggaagttatattttcagacaagacataataattctaatacaagctagaccttaaggaattgaatgacagaggtaacaagaaaatgctgtaaaatggctgaggagagaaaaatcctctaatttgggaggagctcagtattgacaaaggctagaaatgggtagagaacactttcccaaaagagatgtcgtggtgcctggtgagacaggctgtgaacttgacttctcccatccgttccattattaatgtgtgtctctgtgctctagcattcatttcatcttgtggacatgctattgtttccatttaaaaactctcttgatcacaatttcttctgtggcgatggtctcatgtcctgctctcctttttggcaaaactccttaaaagacttgtctaggctcatgcctccaaatcctattctgctattatttcctggaaatatatctgtcaggccttcactctcatcattactttgcaacttttcttgttaaggtctccaaggacctctgtctttttaaacaaagctaaattctgtcttcattgtatttgacatacaagcaggatttgacacagttgatcactctcttttcatttagaggactccacattctccgggttttcctcccatatccctgactatttcttctgtatcctttttctgtgccctcctcttacctttgaacacttattgttggagtgctctggaactctctttagaggactttcctgtatctacgctcacgcccttggtgatattttacttcaaataccaattatacacagacaatactcaaatgaatttcacaatcatatttccaattaaacacttaacatgttttatatatatatataaaatattatttgaatttaattatctttatcttcacatcaatacataataatctatcagcaaatcatgttggttctattttcaaaaatatccatagtctttcattcttcctagattcaataattcctttgcttgtctatttagttttctatatgtcattaatcttcctcatgctgacgtctttgctacatgaatatatacatatatatggtacacatacatatatattttatgcacacacacatacatatttatgctcaaggacctcctgccctgctatcagcctagagcttttcatatacctctacatcctcatttcctgaatcccatgccttccattcttgttgctgttgtctgtttactttctttttgctggaactatattactcaatagcttcctgatataggaagttaaagttttgaatccttgcaaatccagaaaatgtttgtattctttctttacaggcaaccgataatataacttagcatagaattctggattagaaataactttactcataatttggaaggtaccattcttagctttttagtttactataatgttgcagaatactgcagtgatattctgtattttctatgtgacttattttattggtctctggaaatttttgtttcctttttatttttggaatttgaatgcttcatgagattgcaccttgatctgggtttttccaccagcatgtggtgagccttttttttaactttttaatattttatttttaatcaatcaacacataatatttatacctattatgggatacagagagatatttcaatacatatgtaaaatgtgtgagtatcaaatcagtgtaattagcaaatccattaccaccaacctgtatcatttctttgtgttgggaacattcaaaatcctttcttctagctatttgaaaacatataataaattgttgttaactatagtcaccatacagtactataaaacacaggaatttattcttcttacctatctgtgattttgtatctgttaaccagcctctccctatccccttctccctgctatccttccaagactccagtaaccactattcgaccttctactttcatgagatcaactggtttagcttccacatatgagtcagaacaggtaatatttatctttctgtgccaggcttatttcacttaacataatgtcttccgggctaaacataatgccctctaggctaatccatgttgcttcaaaagacagagttttattccttttcatggctgaatagtatttcattatatatttatatatgtgatatatgatatatatatatatatcaaattttctttatctattcctttgctaatgagcacttaggttgattctatatcttagctattgtaaatagtactgcaataaacatgggagtgcagatatctcttcaacgtactgatttcaaaacgtctggatatatgtacccagtagtgggattgctgaatcatatggtagttctctttttagtttttttaagtgaccttcatacttttttccataatggtatgctaatttacattcctaccaacagtgtataagaattcccttttctctgcatccttgtaagcatttgttattttttgtcatttttataacatattttaactgggaaaagataatattgtggcttttgtttgcatttgtctgatgattagcaatgttgagcattttttcgtgtacttgttggctatttgtatgtcttcttttgagaaatgtctgtccagaccatttgcacctgttttaattggattatttggggccattgagttgattttcttatatattctaggtattaaacatttcttggatgaataccttgcaagtatttttccattctgtaggtcgtctctccactttgttggtagtttcttttgctgcgaaagggcattttagtttgatgtaattccatttgcccagaccaatgtcctgaagcacgtctcctaggtttacttctagtattttcatagttttgggtcttacgttgaagagtttagtccattttgagtggatttttgtatatggtgagagacgggggtctattttcattcatttgcacatggatagccagtttccccagcaccatttattgaagaggatgtccttttcccactctttgtttttggtgactttgttgaaaacccgttggcagtaaataggtggatttatttctgggttctctattctgttccattggtttctgtgtctgttttacgacagtatcatgctgtatagctttgtagtaaattttgcagttaagtagtatgatatcctcagtcttgctctttttgaacaggtgactttgtctcaagattgatttgtctagctcagtggggtggctcacgcctgtaatcccagcactttgggaggctgagttggacagatcacttgaagtcaggagttcgagaccagcctgaccaacatggcgaaagactgtctctactaaaaattcaaaaattagcagagcatggtggcgggcacctgtaatctcagctactcaggaggctgaggcaggagaactacttgaacccaggaggtggaggttgcagtgagccaagactgtgccattgcactccagcctgggtgacagagagagaccccacctcaaaaaaaaaaaaattgctttgtctattctgggtctttatggttccatgggaatttaaagaattttttcttctatttctgtgaagaatatcattagtattttgataggaatcatattgaatctgtagattgcttttgataatacagtcatttttataatattagttcctctaatccatgatcatgggatgcctttccattttcttatgtgtcctctttaatttctattataagttttatagttttccttgtacagaacttttaccctttggttacatttattcctcagtatttttgtttttttagctatcgtaagtgagatttcatttttacctagtttgtgcttgttgtataggaatgctactaatttttatatattgatttgatatcctgcaactttattcgtttagtttatcacttctaagagttttttggtggagtgcttagtttttattacatataagatcctgtcatctgtaaaccagaactagttgacttcctcctctccaatttgtattcctgttatttctgtctcttgcctaattgctctggctaggaatttctagttctaggttgaataaagagtagtgaaagtgggcatcaccatcatgttccagttcctagaagaaaagttttcaccttttctccgtttaataagatgttggttgtaggtttgtcatatatggcctttattattgaggtacatttcttccatactaatttgctgacagtttttagcataaagggatgttgaatttcatcaaatgctgtttctgtcttttgagatggtcatatggtttgtccttcattctgttgatatacttttatttatcccatttattcaatttgctcatattgaatcattcctacatccttggtataaatcacacttgatcctggtatgtaatatttttgatgtgctgttggattcggtctgccagtattttattgatgatctttgcaactatggtcatcaggaatattggcctgtagtttttgctgttgcatatttggttttgctatcagggtaatgctggccttataaaattagtttagaagaatttcctctccttcaattttttggaatagtttaagaaaaaatggtattagttcttctattaaagtttggtagatttcagcagtgaagccattgatcctggacttttctttgttgggagactcttaattactgaatcaatctcattacttgtgagtgttctgttcagtgttctattcctccttggttcaattttggccagttgtatgtatccacaaatttatccatttcttctaggtttttcaatttgttggcatatagttattcataatagtctccaatgatcaactgtatttttgtggtttcagttgtagtgtctcctttttcatttctgattttatttgagtcttttttctttttttctcagtctagctaatggtttgtcaatattatctttcaaaatatcaactttttgttttgttgagcttttgtattgtttttggtctcaattttatatccttcttctctgatcttttttatttctatattgtgccttgcagaggacctttctagttaaatacatttgggaacttttgagcttcctggatctgggtatctatgtctgtcccaagacttaggaagttttaagttagtatttcattaataagtttttattaccctttttgtcatcttgtctttctaagctcccacagtatgaatagctgtttgcttaatggtgtcccacaagtcctgtaggctttctttattctttcttattctgttttctttttctttctgtctgcttgagttatttcaatagacctgtctttgagttcataaatcatttttttctgcttgatctagcctgttgtcaaaactcttgattgtatttttatttcattaactaaattgctcagctccaatatttctgtttggttcatttttatgataccaatttcttgttgaatttctgatttagatcatgaattcttttcctgatttttttcagttgcatatctgtattttcttctatcttgctgagtttccttaacatcattattttgaactccttttctggcattttgaaaatctcttttactttggggtctgttactagaggattattgtgttcctttggtagtgtcatgttttcttgctttttcatgtttcttgtgttcctacattgatacctgcacatctggtaaagtaattgcttcttttaatgttatggactagcgcttatagggaaagatttactcctgtagataagttctagagtgttaagtagagggtgataacttgggtcctgagtgggcacagtagtgtagtctctgtgaagtttcttcaactgtaatccatgtcagtaatgtttgtgaatgcttcactgacctaacctgtgggagtttgtggcagcagtgacatgactttactggaatcaggcttattgagtgagttatcaggatggaggcatgtttgtgcatgtgatgggtcacctagcttaggaactggcttgctttgggtgaagccgtgggctgtttctcaggccgggggcatgagtgttcagtggatcagctggttctggaactggttcaccaggagtgaggctgttgggtcgtttctcagtttaggggcataggcacatgttggtttgccagccattaagccttttaaaactatggtttcatgtctggaaaatgtgtattttatactaattctttattaacttattcctttaattttttttccttttggtgtatttctgaaaatttgttttcatctcattattattgttagcctttctgatgtattttcttatctttctcttctaatcttttagttgagatttttttccagcctttttttttttttttggatatagaatcttagtatattgtctaggctggactcaaactcctgggctctaacaatacttctacctaagcctcctgagtagctgggactacaagcacatgccactatgcctggctgtatatttttaatatttaagaattctttctttcaccaattgtttattcttttaggcttttttttgtttctatattttttaatgaatgcaacttttatcttctggggataacagagatattttattaaattgttattagttgatgatttcttccatctctaattccctgcattgtttgtttcctcatctggattatcatttttcatcctcctcctttatttttgtttctgtcattcacattgtatattttgcacatttgatgaattttgccatctgctttattctgtagagaaatggtaaaacatttccaaaatggcctttactcatgtttatgagcagcaatacagctttactttgcagaggttaaaagctcaaatattagttctagagttcttatctttgtagtatttttctgccagtttcctctttatggaaaataactctggctcccggctttctttaaactgtgtagaaggggagttgtggtggtaaaggggagaggcagtgtatacagactttcacttaatcctttcatgtctaccttgtgcctcttccaataacaagttgttgatgttccaatataatggagctggttaatttcaattattcttgacaataagactgatgtcactgtggagtaggattagtttggctggctgagtggggttgaaaaggggacctgaaaatctaaatactttctatgtggaatacctctaattcatgattctcaaccttggcactatggctattctgggctgggtaatttgttgtgagggatggatatgtgcattgcaggatgtttagcagaatccctggctacatatcagtatactacatgccagtagaactcctcccctcactgggacaaccagaaagttcctctggggacaaaatcttccttagctgagaaccattgtttaactttagacctgtgtgtgtcctcttacttctctcaatgtttcattatcttcaagtcttaaggctctcaaagattctataggaaaaatcagttttcatgttttaggaatccaattcagctagcactcaagctgtaacttctctgattattcaagaatgttgtcaatatttatttctatttcttaatttcattttctgtcttcaaaatttttgtaaaatgtatttcttccctattgatttctctgctggcctcattaaaattatgggttatattttttaaaattcctatttttttaattgaagtatcaagaaaaagaggaaaaggcacatgcttgatctgaactttatcaaaaattggtaattgttttcatctcttactattaactcttttttaaatcgatcctcttgctttaggaatccaaatcagcctgcactcgtactgcagtttctctgattagtcaagaacgttgccaatatttatttatatttcttcatttcatttttcgtctttgaaatttttgaaaaatatatttctccattattgttttctctgctggtctcattaaaattatgggttttacttgttaaaattgctgttattttaaagtagtgagaaaaagaggaaaatacatgtgcttaatctaaattttaccaaaaattttatattttagtaaatgtattcagatgcatatttttctgacaatgggcagtcttagttaacacctgtatcctttttcttgagcaagaaaataaatttattataatttttacttattctgccctagtattcctcatggataaatcgtgtcttaattttattaatctttgaatgcatcaattctaataagttggatcctttgtcagaaagcagaatgtgtacaatatacttatcccttagttttgtcttcctgggaactggctcttgatcacaataggatatatacctacagatcagcttcattataatttaatttactgtatttggcagcaacatcttctagtggtaacctagaccgagatgaaatattccatttcaattgacagttataaagctacagaccatagatttcagttatttgagtagttactacattaaaacacatctttttttcccttcctttgctcccaaccacatgtgcagcaaccagtatgtttctaaattttgctcctgtttataatgctatttcttaagcttctaaacatcgcagtgtgcatttcacctctgctaatctccatccaaattctgctatgttttggagtttgtaagaaagtgtagtgctgatgaggggattgaagtttcaggattccaattttggctgcttaacaggaacagttgaaggatggcatgaggtttttgatccatggttttccatttccctggtatagtaagcataggtatcactgccaaacttctttggagctctatgttatttgggttgagagcttggagctatgttaaacagctgaataaatgtttcccaatgcagctctgtctatgatgcagctcctgaaaattctctctgaatgttgtcaactagttttctcttaaattgagtttatagttgttttgtcaggtccaaatgtctttttgagactttactttgactgaacattgtgatagaatttatcctcctgcttgaaatgataaaaatatggacaaaatgtattaaataattgtttgctagatgttggacatcaggcaatgaggacaatgtttgctgagaaataggaaataaattatgtgaatcttacaattgacccggattactgcttacagagtatttctagaccacgacttagggagagaaatcccagatggagctcagagagttctccaaattgaagagatatagccaagtgtttcaggaattcaaagtagttagagtttgcagagagcagatagaggaacacagagataatttcacagatctacagagcatcttccttaagaattcactttactacggttcactgcatgtatgaggctgcagaaagcacaactttcaattattaaaagtaacaataattaacactcatgtaatgctgggtatgtgcctatttccactagctgaactggcgagaaaatttatgattcgtgggatatttgataagagtacacaaaagggtctagcctcaacagtggagaatagccctaggctgataactacttcaataccacctaataaatcttaagagcaagactcaaaaggaactgtttccaagtaatttaactgcatccaagaacaaaacacaaatatatttgtaagaacactgaaatatgtagtacctaacaagaaaaaattcacagtctctggcaccaaatcaaagattatcaggcatgtaaagaagcaggaaagtacaacttataatgaggatgtaaatgcatcaatcaaaattgatccagaattgtgagaaatgttagaattatcaggccagtatgttgaaacagatattacaactctacatagtttaaaagctacataaaaatatggaaggtactaaataaccccacagatcaaaattccagagaaaaacctacactgtatggaatgaaaatacactggatataattgattatacattaaacataaaacatttatgttatatataaaaaattagtgaacttgaagtcatagcaatataacctatccaaaatgaaacagagttgaaagagcatttgtaaaaatgaaaacagcatttgtgagctgtgggacaacttttagaggcttggtatatgtgtaattggagtccctaaaggaatggtggggtggaggtgggaatataaaaaatattcaaataatttatggctgaaaaattccaagtacagtacactgaaaaccataaagccacaaacccatgaatctcaagaaaactaaaaaataagtaacatgaaggaaatcacaaaaggcatattataattgaattgctcaaagctagtgataaatttttaatgataaaataaaatactacagcagccagaggaaaaagacgtgttaaatacaaaggcaaaacagtaagaatgacaacagatttcctatccaaaataatgcaaagaagaagacagtggggcaacattcttataactatgaaagaaaataaatagtgcacttatgattctatatctagtaaagatatctaagatgaaggtgaaataaaaactatttgcaatacatataatgaaagagttcatcacacagaaacctatactataagacacattaaaaagaagtccttcagtaggaaataaaatggtatcatatggaaatatggatctgcacaaagaaacaaagagcacccaaaatggcaactgcattggtaaatacggagggtatttttctaatgatttaattttctttaaatatagttgacagtttaaaaaataataataatatagtaaaagttttataacatgtgtaagtaaaatgtttggcagtaataacacaataattaagagggggaaaaggaagtacccttgacccttgaacgacatgggagttaggggcactgattccctgcacagtcaaaaattcaagtttaattttgactctccaaaagcttaactactaatggcctaccattgaccaaaaaccttactgataacatgaacagtcaattaacatttattttgtatatattatttactgtattcttaccataaagtaatctagagaaaagagaatctttaggacaatcataagaaagagaaaatgtatttactatttgttaagtgaaagtggatcataaagatctttgtcctctttatcttcactttgagtaagatgaggaggaggaataagaggaagaggagagattggtcttgtggcctcatggctggcagaggtggaagaagattcttttataagtagactcatgcagtgataacccatgttgttcaagggacaattgtataccgttgtaagatccttatactctatttgaagtagtctgtcacttaaagctaggctgtgataaagatgtaggataaaaaccactaaaatcataaaacaaagagttataactaataaaccaacatggagataatttgaatcataaagaaatataaaataacacaaaacaggcaaaaaaaaaaaaaaggaaaaaagaaatcccaagcagatgggacaaataggaaatatcaagataatagatttaaacataatcatatcaataataatgctaaatttacatattctaaatactccacttaaaatatacagattggaagattggttaaaaaaggaaaaagtacaacttaactatatgctgcttacagaaaagatatttaagtataagacacaactaggttaaaagtaaatgttggaaaagataaatcttgtgaacactaatcataagaaatctagggtgactttattaatatgagaaaacatgaatttttagaaattttgtccaagataaaatattgcccaggatgaagaaagtaatttcattttgcaaaaggagtcattttgtcaataggacataacaattcttaatatttctgtaccaacagcagagcttcaaaatgcacagagcaaaaactaacgtaactgaaggagaaagtaaaatccacatttgtcggcaaaaatttcaatacccttctctcaataattaatagaacaaactgacaggaaataagtaaatctatagattagaacaacactgtcaaccaacttgacccaatggccagttatggaacattcaacccaacagagcagcaaactacacctacttttcaggcctacacaaaacatctaccaaaataaatcaaattctgaaccataacacaagcctcaatagatttaaaagaattcaaatcatataaagtacattatggggctgcagttaaattaaattagaaatcaataacaaaataacctggaattactctaaatatttggaaactaactaacaaaattctaaataatccaagattagaagaggaaacccaaagaggaattaagaagtattttgaactgaatgaaaatgaaaacacagcataacaaaattgtgagatacccaatatggcaggacttagtagtatattaatagcactaaatgcctatgctaggaaaggatgaagatttcaaagaaatatcttctactttacaaaactagcaaaagaagggaagacccaagccaggctaatgaaagctatttctgagtttctaactgcatctcatggggatgatcatttcttttctctgctcttgtggctgaaagcatgttaaggccaaaattgtgattcaggcaagacccaaatttataagaccaagattgcattttaagccataaagagcaggagaatctccatggcttgaactgtgaatagatatttgtttgttatcagagatagtaattgtactgctttatctgtatttccttccatgttagtaaaagaaagctcagaagtagttgatcacatgatcatagagaataaactacatttctcagtctccttggcagctaggtgtagaaatgtggtttaagttctggtcaatgatattttatctattaacgtttgctgtttaagttagtggctaaaaacaataaaaattgcgtatttatttaggattctatggtttggctcagtgctggtgtgcactggcttgtccaacctcttctgggctctctcatttgtctgtgattagctagctggtcaagcagcagttagataggaagacctcactctcatatgtggtggttggcaagctggctgttcactgggacagtaggagcaattattagctggggcacctcagttctctgccatccaacctctaatattccagcaggatagcatgagcttgctcacaaggtgatctcagagttccaagcccagcaagaaagaatgaactctaaatttgcaggcattttaaattgtctgtttgaatcatatttgcaagcattatatgtgctagtatttggccgaagaaaaccaataggtcaatctagagttattgtggaaggatcgtaccaaagagtgtcttagtgtatttttaaaggaaaggggaatgcctttctctctttctacttcttggtggacagcaattggttttagagtatgagtagatttgtattttctcacattaaaaaggtagaatctacaactgtggaatctatagaagtaaactgggtattttcagttgaatcttgggaaactgactaaagttaacatttttaaaaataataatgctttattttatttttaaactacattttaagatatagttaatatacagaaattataatctatatgtgttacagagagattaatgaaatgggagtaaacttgttattttattaatttgtggcagagttcatatagaaagaattgtttttattgacaaaaatatctcgataagacttaggttttggcaagaatcaaggcaatattatacacttttgagatgtctgtgaaaaagtgaccatgtaaagtcaggtgtatagaaaaaagtgaatatgctttatagcagagcaaggaggaagaagagagaagccacagaagatggtagataattggagtgcaagatggtaggtaattggagtgccaatgaaaatctctagctatagggaaactaaagggatattatgaattgcaaagtaatgatttaattcctcttttaccccgaatctttaataaggtttaacgactacaatttgtttgtttgttttgaacaagacttcttgaaattgaggcattagctgagtttcacctctgggtgacatagggcagtgctggcagaagccagaaagacttcaaaatggaagaagcagaagtgtagggtcagggcgactacgaaatgatcaatacgcatagaattcttataaacttaaggaggacttctgtcattcagggatggaattagggtcataggctgccttatctagatttcaaaaggcaaggacgctccagatgatacatgcattacatgtaaataagaatacaacaaggccaggtgcagtggctcaggtctgtaatcccagcaatttgggaggccgaggcggacagatcacctgaggtcaggagttcaggaccagcctgaccaacatggtgaaactgtgtctctactaaaaagataaaaaattagccgtgcctggtggcccagctactggggaggctgaaacaagagagtcacttgaacctgggaggcggaggttgcagtgagccgagatcgcaccattgtactccaaatttgcaggcatttttaaatgtctgtttcaatcatttttcaagagttaaactccatctcaaaaaaaaaaaaaagaaaaaataacaaaacatataaaagataaaggttttgcacttttatttctctttaccttttgcacacttccttgctctttgaaaaagtattgtttacatgtaatgtttaagattattctttgacggaaacatcacatatgtccaatgccttaaggtgtttactatctctttggagaacaggactgatcctgtaaagtaccagcaaagactcaggcctgagttatgggttgatgtacttgaagtgttacaagtatgtacccacacgcctattggattttcatggtatgcctatatgttacacatatccaccaataaatgccatctatttttgtaggctgaatcaaatctctgtcttgagtaatgattttgtatcctttggactagatctgaataagactgagaaacagccaggcacaagaaggcaattcattgttctcactcatctttctaaacctatatgcatctttgatattgaggttcattattagctacaactacatttggtttgcatataaccatttatttttcagtcttagatattttcatatcaattgtcttaattatccttaaataaagcttccagtgagtctctatttcttggatgaggacaattgaggcagtgatagttctttaaaaattatttaatttctaagtccttcactatatcttgtaactgaatcccaacctagatatttttaaatatccttgaaattaaatataaatcaaataatatctttccacatgtaggttacttccctctatggtaactctgcctccaaatgtgaagagctggattcaatccaagtgaaagaaaatcagtggggaaaatgtcagggactataaaagagatttgaagtctgtacccacattgctgtgttagagtcctgagttattaaatttctcatatttatttgacattttatatacatatgtccacttatgaagagtttagttcttatctttctttaatcaacacagtattaactatgcatgtagtagatgaacactgtattttatgtatttgcattcttttcaaaccagatgcttaaagaataaaatgacacagtgttttagctgttattttgctttaaaatgctttaaaacaagaaacatttttggaatttcttatcacaatataaatcagctaagtatatttaatgtggtgaaatgaatcataaataggctgaaatagtcctaaaaggggagttgggtaagaaaaaaatgtattaggatcaatatcaataggcataaataattctattaacaaataacattaaacattgttacactgtttatgggatgatatcattatatcattatagaaagattctcccttaatttaaatacctagcatgtacaaaacaagtttaaatcaatgagacagtaaacaagaggaataaaatagagaggtgggctgggtgcagtgattcacgcctgtaatcccagcactttgggaggccgaggcgggcggatcacgaggtcaagagatcaagaccaatatggtgaaacctcgcctctgctaaaattacaaaaattagctgagcgtggtggcgggcgcctgtagtcccagctactcggaaggctgaggcaggagaatggtgtgaacccagaaggcggagcttgcagtgagccgagattgagccactgcactccagcctgggtgacagagcgagactccatctcaaaaaaaaaaaaaaaaaaaaaaaaaaggggaagtggtgtcctaaagactaaattaactgctgactattttctattttcagtctctacatatttatatttttatttctttatatagcattgaatggttaattccccatttcccttttattcttatacgactaacttctatgggttttattttcattcagttctgtatattccccctgctgaagcctcccatgttgtgtgtcaagaggaaaaatatcttattaccttcttgtctgttgaacatttagttttcttctccctccctccctgtcttgtacctaatgagcaaattatctaaaaatagatacgttcatcattctacaaaatgttgtatcttctctagattggaggacagtgtaattgtaagagacacgtgtctggcaggcagtgcaatcagtgccagaatggattctacaatctacaagagttggatcctgatggctgcagtccctgtaactgcaatacctctgggacagtggatggagatattacctgtcaccaaaattcaggccagtgcaagtgcaaagcaaacgttattggtacgtgtaacgcaaaagtttacagtcacatctctattaccatctggaataaaattctctatttgatttcttaactgaagagtaaagcaaatttctttgctcaagacaggctggaaaaaaaaacaatttggatgaaattaactgtttaaaatgattaaattaataattctatcaaactgcagcttgaagcttagtttaatcaaccctttagaagtttctttattctgtagatgcattaattcccatggtcccatactaataagtcatagaaaaatataatttgcttactgcatagatgtttcttttagaaaattagcactttttcaaaatgttttacacttaatgagttctaagcaaatcatttccatgctagttttcttaatagaccaaaataagtggattttttcaaaatattctgtgctacagggtcctttgtgataaatctttccatttttttctgttatatttctttgaactgttcctatgaaatgcaaaataagtcaacataattctacagatcatgtatattgctagggttacttacaaagggctacataattttaattttgtaattcagcaccaagttgattataataaacagctgccttcggtgttatttatcatttttttatacaagacgtgcttttttgtttgttactcccacaggtatttttcggaaattagatttgattatagcaatttattacatccaacatttttgaggggaaccaccgccacataaggacaaaatttatcaagtgcctaaaatgcactatgttcataatgcactttgaaattttgatatatgagaatattatgagaggaaagtttcctgatgaagtgagccctgtattgtaactgaatatgtcttggttcctataggaagtttaaaaaagacctttgcctttctattgtcattcaagacaccaagtcatccatggtttttctaacactgacctgaaccttacaatagtaaaaatatgcctggcagtgattacacacactcctctctctctctctctctcacacacacacacgaatgcttacatgtacacatgcatatgtacatatcattctgaatactattttcatttctgtgatatacctctaaatctaattctttatcttttatttatgtaagtgtacatcatgctacacaattcagctagacaagcgtttcaatttaataaagagaatgtaggtgtgtttagtggcattacacgagatttctctggtttaaagaaacattacatgaaaatctgtaccataatttacctatatgcatctcaagcatacagaaactaattttttagaaagaaagaataacgtgtaaagagaagtacatatttgtatgtgctatccatgatgctgaaggaattctaagaccctgaattcaatttgtatggcatcctttgttctttaatgtgagatatattttaaactcaagatgtgaaaacaaaagttaaagcaagacctttaaagacagtgaaataattacttctttgtatcaatggaatctttcttgtgatggttagattccagagcttgaggaagggaaaaatcaaaattaatttagaatgtataatgccatccctactatttgcctgttttgttgattgatccagatggttttctgcaggaaacataaatatatattttgtgaagactaaattacttcagtattataaataattattatttctagtgttatttctgcaaatgtagtactttttataaaaacaaaaacttgatatgcatatatatttactttcctaatgggatcagcaagtaactttattcaatttcaccttgttaatatgaaaaaaaaagaagcccagaaaatacaagtgtatgttgtatacgcttcagaaagcaaactgttagagttaacaaaactgttaaatcttactaatgattctatcaccagtaaaatacattagcaccaataattttattaaagtaggtcattcatctagaataaaaagggagaagaatgtgaattaaatgccaagtgtgctaactcgcctgtacttgttaacaccgaatgtgatgccctgtaggccttcctgactatcgttaggaatagattacctgtcaggaatatgtatggcatattcaaataagcactgtgcatatttttaaaactgatatgatatgaatccatgtagaccaattttaatagttcaaaatgagtcataattcttgttaacaatacagttatttttaaaatttgcagcaatagtggtccttttttattttccttattgaaattaaatgatatgccttaggtgagtcattcatcactgttaaagaacttgccttcattggagttcttgaatttttatccatatatatacatatatattatgtatttccttccagtttaggaaatgcttttctacatatgagttcctgagtatgtttttgactcttattttaagattaatttttaaattgcaattatagcttgaaataaatgtttcagttgattcaacccatgcagtgagttatttaaattcatggatatttggaaactatctaaaggaagtattttgcatctaaacatttactattctaatttttttatttctttgccttgtaatacccttttatcttttagaataaccttacttgtcagagatttaagtttaggtgataaaacatttttcttcattcgtaaaatgtatatgtgtactcctttaaatagaagtaatataaaaaacagaatttacttagtgtttaaagaggtatgttctgagtcacacaagatgacaagcaatgtgattgctttatgagccaaggagagcatgatttatattaattgaaaatgataaaatagaggagcatacaaaaggattaaaccaaaaattgccctggataagttttatttatattaattacttaaatgtgtggattcagaaataagtgtatatgctgttttcacaaaaatagttatcagctgacatttttttcttttttcccagcttcacgaaggtataattaaataaaaattgtatatatttatggcagacaacatgatgttttgatatatgtacacattataaaatgattaattccagctaattaatgtatccatcacctcatgtacttatcatgtttttggggtgagaacatttaagatctaatctcttagcaattttcaagtatacaatacattattattaagtatagtcaccatgctgtacaatagagctccagaacttattcattctgtctagctgaaactttgtactcagcttaaccttttattaaacatctttagagatttcttatctttagaaaaacaactaatttgttatatgtaattctactataattttaaatgagcacatttgttaaaatagtttttaagatttgttaaagagaaaaagagctccagcatatgtaacagaaacaacatttgcattaagcatttttctttgcattaagtaataattaaaaatttatgaagttcatcgcaaacagttgtatattaaagctaaattaaatattgtcattgaattttgagagtaagattggccccctatggcattgcttgtgagaaaacactcaatattttgtgttcgtatcatctgcagtagcattgtttgtgtctcgtctatcttgaatgaaatcattttcccatcctcaccttttaaatatattttatctttagggcttaggtgtgatcattgcaattttggatttaaatttctccgaagctttaatgatgttggatgtgagccctgccagtgtaacctccatggctcagtgaacaaattctgcaatcctcactctgggcagtgtgagtgcaaaaaagaagccaaaggacttcagtgtgacacctgcagagaaaacttttatgggttagatgtcaccaattgtaaggcctgtgactgtgacacagctggatccctccctgggactgtctgtaatgctaagacagggcagtgcatctgcaagcccaatgttgaagggagacagtgcaataaatgtttggagggaaacttctacctacggcaaaataattctttcctctgtctgccttgcaactgtgataagactgggacaataaatggctctctgctgtgtaacaaatcaacaggacaatgtccttgcaaattaggggtaacaggtcttcgctgtaatcagtgtgagcctcacaggtacaatttgaccattgacaattttcaacactgccagatgtgtgagtgtgattccttggggacattacctgggaccatttgtgacccaatcagtggccagtgcctgtgtgtgcctaatcgtcaaggaagaaggtgtaatcagtgtcaaccaggtaagaaagaaatgtattacattttcagtgcacaatgacattccttttgttaacttaggtaacttctccctgtttctggtttgtggcttctacaaattttatttccaaaatcattactgtatttatatcattatccaacacatatataactatttaacttattcaaaattatctgcatatttatgttactattttgagaggatactttagataaaactcagccgatcggatttatttcataattgagactcaatttctacacttgaagtaaatctcctttttaacagttttttaaaaatcagatcaacaagagtcaattttattttccagagaaaggaaaatttgagttgaatatccatacaatgccaaatattcaaatgatgaactaaatctctgaataaagctggctaaatgtttttgctgaagaggctatatgttctagttttatatagaaatacctagaattgtttccacatgccatcaaattaataaaataggccactgtttaatctcattatatacaaacttatctttccatctctttcccaattgggagagggatagaccccatctatggctctccttacatttaagattttaactaaaatactataccttctttacaataaattcattatgatatgatgataaatataagtacttatccgttgtttaacagctgtgctaattgttgtcctgtcagccaatattagctctgagttatatgggtctataaaaatgagcatgataccaactcaaaagtgtgatttgcttgccagagaaggagtagaacaaaagttctgttaacatagcaaagaatccagcctaggataattgggccatgcttttcctttggcattggtcagtgtgtaagatcaaagagacaagaaggaattgatgaagagttcattctttttgtgatgtaagtattaaaaaacaacttgaactggtttaaacataaatggagactatattataactagatactccataaaaacctaaggagaaggaccactgcagtcaggactcaggaattagaatgcttccactgatacatattcatttgtctctctctctctctctctctctctctctctctctctctctctctctcagaaggggactttacctctctctttctctacatgggtatatggccaccctatgtcccctgaaattgtttataattctaccaccagccacaacagagcgatttattagctacctcttagttataatttctagaggaaaattcgaattgactcagttttgtttggttggttacctctgagccaattcattgtggccaggggtgtcacgtacttataaaatgagtatagcttttagggaccatttcatcaggtagaagcaaggtggtaagtatcccagaagacaggaagattatggagacctgggcagacagcctaaatgacagatacagcacattcactctttttaccttcaggttaatcctttcaaatttgcaatcaattaactttttgatatcctaagatgagatgtttttttctcttttagtgtttatcaatatctctaattttggcaacaaagtcctttgtctcctacacagtcaaataaccatgatttatacatccttctttctaagtaaaccaaaacaagctaatagatcaaatgttatatccttttgagtaattatcaattgttaaaatttactgttccagtctaactttaattgtatgtataatacaagtcacatgttttaaacaatttttctgattttggaaaaactctgaaatcatagttacaaacatttgttccctttggtccttccaatgaaagacccaatccatcatctcaatactttgtacacctaccagatatctaaatgatgaactaaaattgttagaaaacctttgtttttctggttgttttgcatatcattgcagaaaaagccatggataatttaatctacaccatgcataagactgtctcatttgttcccttcctaggatgaagaaatactgacttcattgctctttcctttatctttgtggctctcattgtggtgatctctttgttcccaactctaagcccttttctcccacccaaatctatggctctttcctgtctaccctatatagtattggcagaataattcccctaaagcacttaattcgttatgtcattctcctgtagggttaccaaaaatgggttttattttgcttatcatttgagtccaatctgggcaaacctttatgagtttttatcttccagtcgcagtctagacacctagctttgcttcctgatattccctttctcccatcttcttcagtcactgcagccacttcactggagctacacatgtcacatgcagagccgatttcaatctacctgatgctttggttcattctcctttcccgacatggaatgcagtataatcctccttttcaatgttagttggcatcctctgactagttttactactcaacatactgcctaaaattctccatcactcagtgaacaacaaagttgacatgagcatcagtgttttaagaggtggtttaactcaaacctatagaaaacttgaaaataaggtgtttttgaaaatgtgctcaagcttctattgtcttcatgttcaatttattatatgaccttgaagagaggtttatgttcaagaaataataatacagatctcattgtaattaccccataattatgcttcttttttctgaagaccatatggacctataaatgaagtcaatgagttaagagtagggagcattaaacatggtgaaaatatttttatttactgaaaaaattcaacagcgtattgtaaaatatttagtagaaaatgtaccagactgagaaaacatatttggagctccatttcttcagcttactgactctctaaaggcattcccctgtccttctctacagggaacttccatattttcttccaactgtccatttctagccaggggtaagcagatttatctttaagctgttacctgagtggagcctgtatcagttctactcatatcctattgatcagagctgctttgtatatccatacctcactgcaaaagaggctggcaaatagatgctctatctgaatatcaaggtatatatttaaaacttggggcctcttttattataaggagtaagaaagagattgatccttgaagacagccttggctatactaggaatgtcctacacctaaaaaaattagctggcagaacattagtcaacttccgaatagatgcttttaatgaccatgagttttgtacttttattgatagatcccattattatcattttttaaaaaaatcagccaaagttaatgaaggcctcttgagtcctgaggaaatatatgcacaaaatcccttcttgggatcttcgactgtttcttacatgctttgccttatagactcactgctattctagtcactcttccttccaaggacatgctacagtttatagtggccctgctgagttattgacccaggatattaacctggttatgaaaagctagaatgatcaagctacagatttggattattatattttgttgaacagtgcagttattttcatatagataaacatttctcttactgagaaatcattttcttctgggtactgttgagttcttaatttaatcagagaacattttatgtgtagtagcaaacggtactttcagtgagcttaaattttgatggggaaactgacagaataatttgcaaataaatatatgatatgaatttaaatagtgatgatttttggatctgtggctctactcaattatgtttctttcttgctaagagtttaagatattatcgaggttaccaaatagactatttatttagcacttttatatcagtgtttagtttccagaaaggtgaactgggtagccatgtttatattgtacaagtgaagtcacattgatattttattgcaatggaaacagtaagtggtttaaaaggaggaatggtgaagtgaaagaaattatcaacctgtttctttttatattattatctaaaactagtcatttttctgtttttctcttttgcattttttctcatttaagatcataagtgcctgttttaaaaagcagcccaatgagatgaccttgttaaaactcctgattatttctcagtatcgtcaattaaatgaaccccttattgtgtgcccacaatgtacaaggaattatatatacatatatatatattttttttttctttttttttcttttgagatggagtctagctctgtcgcccaggctagagggctagagttcagtggcgcagtctcggctcactgccagctctgcctcccaggttcatgtcattctcctgcctcagcctcccgagcagctgggactacaggcctggctaattttttgtattttttttttttttaaagcagagatggggtttcaccgtgttagccaggatggtctcgatctcctgacttcgtgatctgcctgcctaggcctcccaaagtgaggaattatattattattgtagttatgcaagttgaataaggtaatccttgccctcaagatattgaaactttaacaagggaaataagacatttgcacaagtaaataaaatacgataatactttaaatgtgatcattgtttttcagtattagtgttgatgcccattctacatcttcctctaaagaaaagaagacaatttgcaataaacctttggaaaggagttttgttgcgtctgtacttaggcaaatcgtgactaagaagttattctcctaatggccgcacatggtggctcatgcctgtaaccccagcactgagaggctgaggcgggtggatcacctgaggtcaagagtttgagaccagcctgagcaacatggtgaaactccatctctactaaagatacaaaattagctgggcatggtggcacatgcctgtaatcccagctacttgggagactgaggcaggagaatcgcttgaacctgggaggcacagattgcagtgagcagagatggcgccattgcactcctgcctgggcaacaagagccaaactccgtctcaaaaaaaaaaaaacaaaaagacaaatatataccagataaagtcctccaaaaaaagagccaggaaaagagaaaggagaccaggagggggttgcatgaagaaaatttagtattattatccagtattgccattgtttaacataatttgagttttaatcaaaatttacatttgcataatttaaaaaaccaaataaaatgtaaagagccctgccttatcattttcctaggaatttccgtgcttagagaaaacaccttcaactcctttagatgtttattctgggctttcatgtctgtaattctgggttttacatatatttcaccttgatttttaaaatgtagatattatctattgtcttcctcctatagaagatgaatgtttagctcctttcacctcctgcttagcaatccctttatttggttaaatcagtattcagagatttctttattatgactatataaatttactgtacagctatgccatataatatgatttgactatattttctttgctcaaaaaatttgtcttccttagtttttcaggactctctttggcatttctaggaaacaaaactctccaagggaactctgttcaagaaatctatcaggttttgttttttcccactagatatatgagtgggaagttcaggctggttgatctttagttctgttgcacagctatatccaagggctaacatttgctgctatactagggatttccttcccctgtctcctatgttggatcctccatttcctgaatcctacacgttctctcttcttggtttatttgtgtatttggtagagcacatgttctagtagcttctgaaaaagaatacaaggagggaagtaatttgaggagaaaattttgaatatctgaagtgtctttattgtctacaagtgtctaaacataaagaacgatttgaaattttactattatatgaaaacttttcattaaaaaaatttaaatggttgtaccattagctgttagcaatgttaatcagattctttcttcttttctacttttttttttttttttaacgacctggaagtttttaccatctctatatccctgggcactcagtggacccttttgcctatcagtgatggttcttatgttctgagaaaatctgcaaacacattcatagcaacatctagactcatgttcgaccaaacagttggacaccaagcctagccaagttgatgcataaaatcaacaatcacaagcaacctttcacataatgcctgtttacatacttgttgagtccagactttctttagtttaacttctaaaggaaaagcttactgcatcttcctgaagtgtaagagggacaacttcctggttggggaaggtatttagcacaccttatatctgacttcggaaatctctggggctttcaattccaaacctttctgtctagagttacacaacttgaataaattagcttattgtcgggctctccactgcaagagcttagctttttcttataggtatctataattgattgtcatttttctccttctctcttttttttttttttttttttgtttatttcatctctggggatttcaggagggaaacattattcaatctaccatgttttactgacaatgttcccctagtgtttttgaggttttaatcttttcagaccaaatctttgcagacatccttgagccctctcttttccccacaacctttgtctcatctaataaaaccaattctgctgattttaccttcaagtatatccagaatttgaccacttcttgccacccttacttacaccagccaggtccaagccaccttcctctgttcctggactattcaagtagcctcctactcccctttatctttcttccatcacttctcaacagacagccaaagtgatgctgttcaaacttgagtaacatcccatcactccaccttccatttgcttttcaccatagctaataagaaacaaagttgatattctttaataatcctcatggtctataatgtccatgaactctctgacctcatttccacaagtcttcagatcatttcttcctctccagccaacaagcctcattgctgtccttcacaactgttcaatgctctatctcaggcaggtataaaagtacctccatagcagtgctccctatatattttctgaattaatggataattatatttcaaaaatacctcagtggcattctcctgtttttaggtgtgagcctagcaaaggtctgtggtgtttttttcacaacacttacgaaaagcgttgtgttcaaccttgcaaatgaggaaaaataacagtgacctaagtatcatatattttttaacaaaacaagatatagtctgcacatattcatagcccacgaaaagagcaatgtgtgctttggggtggacatttttttattttttattttttattttttttgttttgcttcagaaattccactttaatgtttttttttttcctggttttatggtctcttacagtaaaacttgcattgaaaagagaaacccttatcctgaagtatctttatcataaacagatgtttgcagtagccagccctgcaatgtgcacagtaaaatgtgctgctacaatctgaagctttcatttacttatttaaacatgtctgagagacctagatcatataccacaggggcagacagcatgctggtgtgtgagcagtggggcatggagggagaaggatggggtaggaagggatgagtagcaagcttaaggacttctgcctccctttcatctgtgattgcaaatactgctgacccatagtagatgactgcacatagattcttgtcccactttcctaaaaaacattattaaggaaggtgcatgtaatgaaacctcatgtattattaacctaaccttactacgaatgtacaaggaataggtttaattcaagtaaaatttataggcaatttgttaaagcagcagtgcacattagaaggtacattagagacacattggttttaatatgccattcaataacttgaacagaggttaaaaatgctgcttaacctccattaagtattttaaaaatgctttaatttaaaattatttggagtgtgtgtacatatatgaatgtacacatatccacactaataaatataacactaaatatgttttcccagttccctttttcagtgctggatgaccttataatgttcagcagtaggcacttaatcagaggccaggccgaggaaggcagggaaggatgtcaacgcatcccgagccagtgacccacccttgtccttgagaactagaggcagagagtgcatattgaagactctgtagctttggaataaaacaaaggctaatttataatgaaaacagcttcctatgacatgttttgtactaatagggcagtgcctcctgcttccccctagtatttacttttggttttcttttacaattcataaaacaaagtatcttgtttcattaagtagcacatcatatttattaagtaatgagctcataaactagaattgtgtacaagaccctgccaatggaattggaatcagatgctgatgttccattaaaaatcaatgcatcaaagttgatatccaattatgccacatttcctagtgtttggtgagacaactttctaggttaacatgtttttcacagagagacctgaatctaaaagtaagaacctcttccttgataaatcatcaggaaggaatcttgtcacaggaaatacagaccacaatcttaggtacatctggaaaacaaaaaaaagtaaaagacactgataagaaaaatttctctgtcatagaaaacttgctaattgacaattacaaagatgataatagataatgtttactgagagtccgctgtgtgccaggctctgtgataaggttttgcctgcaaactttcatttaatatgcacaatatttctaagatggaggtgctgggattattctcattttaatctaattgggggaatgaaatctaattaagtagaagagccatttataagtccaggtccatctgactccagaatgtatactctgaaagagtggaactttttctttttctttcttttttttttttttttttttaagacggagtcttgctctgtcgcccaggctggagtgcagtggcacgatctcagctcactgcaagctaagagtggaactttttctaaataactaactcaatatttatcttacacattcacacaacaaatatttgagggtgagttagataaatactgtttatttcatccactttcaagcatacctcaactcatgattctggcttactgcttcacattctgggatacctcatttgttgttcaaaacccaagtagtaggcataaaatgaaaattaacagagtcctgggaaaccacagagttcaaataatgatgaggtaaattgaaggggtctagaaatggaattatctccgagaacttagttggagaaattctggagatggttggaatggcacaggagacaggctttagagcatgcatttgataaacactgaatgggaacagagaatataagttttgctgtggattttgaatatgcatacacatacatatattaattataatctccaagatgtaatcagagttgtcattatttgggttatttgttgttattggatttgattcttagagaatatgttaatgagggcctttcatgggtattcacataaatagaaaaattggattatttatgaaacagaaaattccaataatgttttcccttacatgagcatattattatgtcctttgtttaagagctaagatatagttttagggtgacattttctttctgcagctctgttccatctgttgctgtgacgagcactatattttaaatttattgtgtctgatccatatacactcctctctagactccctgataggacaggccactctgaccaaccactctcatgactcacagatttatgtttaccattttccttttcagtgttaaagggatcatctcatattttagaggatagaagatatttatccatctatccacccattcatccattcagctatctatccatttcattcatacatctgtttttcaataaacatctattgagtaaattaccagagactatgttggtgttaaggtatacaatcacaaatatactaagacattgtgatttagtaggggaaactgactcacatgtaaatgtatcacaatgtgatgagagccatattagaaatatacaatatagagaagtagtaaagtgaaggaaatgattaattcttgaaggatgaggggtcttaggaacttagagaaaatgatttctgaactgacttttaaaaggaaataggaatcagcaagctgctcaagaagggagtagcagcccagaaaaaaaaaataacagcagaacatttaaagcatacctaatttaattgaaaaacccttaaaaattgttttaaaaaagagaaattataccttgggatgaataatattaatatttatgtattcacttgatcaagtctagaagtaattttagcgtgattttatataaaactaccaaatggaggaaaattattattgttttaatttgaaaactaccatcatcaactatactgaaatatagtttacaaacaatacaacaatattgaaaatattgattcataaagccattaccaagatagtcttttgttgcatggatataggtgagccacccatccctccccaggctcttgtgtaactattatgtccattttctgccttaaggtgagagtagtttcttctaaatgtcttacaattagtgcttagccccagcattgccctcctttcttgaataaagcctagaggttacacttcttttctttctccctctcaagaccttggcaaagcctagttgttcatggtcctcaggagagacattgctgggaaatgggctcttcttttatgcccaggacaagtactgtgctatgcaaatagccgctgcaggagataataccagctgccttgctaataactttgaactctgtagattcttctcctaggcaaagccacactattttacaatatgggtgactctttgttttagctggatgatacatttttttccacttgagatttgtcatgtctaaaaccaagggtcagctaaataatatgggaaaataataaactagcgagctgatttggaccatgtatatgtgaactctcagcactacgtaatgcaaggtaataatgttgtcctaatgaccatgcttaagaatgtggtacaaaatcattcatggaatgaaatctcaatatgatcagttacaatgctacagatatataaagatttggaacatgaagaagagctaacaaaggggtatcagaaatgcattacattaaagtaaattgaggtcagttataattaagccacattcaggagttgatgtttaagtggaagggaagggaaaagattgttttctatagttggaagtcataaaaggaggtaatggtctagaattaggcacattcaggtaaggcaagaggtaatctttaagcaggaagttacctgagtcatcctaattagaactgcttaaaaataggacagctaaaatactggtgggattaacctttataatcaggctcctgagaggaggaggggaattaaccccaaggcaaattcccatgcagtcttttcctggaagccctaccttcactttcagtctccctaggtgctttagcatctttttagttcttctctgcttgtacttctgatttttctgtgacattctttattccccaaaacttggactacccaacttctgcaccaaaatgctatcccctacttgtacttacaggtttatctaatacatcatttcttctaaaaatcacccttaatttttccaaattctctgtggcttggagctattgcagtaagtctaaattaattctacttgtaagtatctgtgctaatgggtaatttatccaaattggagagctgttagcacattcatgatgccatcatcatggatttaagggcctagataccttcacaggaagaaaaatacaaagaatcacaaccacagtggccttgaatttaaatggaagccttctgaatttgactttgatcatgtgatgaatcaggtacaagaatatatactaattgtcatggccatgctctatttctggatatgtatatataagggaaattgctgtcaggtggtacaaataaacaaatagcgtaacctggctgtaaattatgataaaaatgatagtattagttgatttccgccaactgaatggcacatattttgagctctttcttttcctctcattgagcacaatgttttctattttgctgcccttgaaactttgtaagacagaatgtataggatctaggggaaggaaaaaaacccaattgttggtaactataagaaaatggcttgttttcaacaagagcctggaatgagttttagagtatcctaattactttttgctgttccctatataatagataagagaatagattcactttttgctcatgctctccttctttcaatatcattgctattttatgaactttaaattagtgtcatgacaattgtacaattcatttttatttgctgtaactgtattcattagaatccttctgtgatccttctaccccattgtttcagtaaaattctttgcagcattttgcacgggcttgtgtgtgtacccatgggtctgtgcatgtgtgtatatgtatatgtacacatacatgaacacacacatcacacaacactaagaaccatttctccctcatatgcctgctccacattcaactgcctgataactttctaattctataacagttaacttccatctcctgggtctgaagagattttaagtaatttgaataaacttttgaatcatatttgtatttctttcctttttccataagaaaaaaaatatgagttttagaggtaagctaaagtctctaaattctgcaggctttttttgtgtgtgtactacttgcagggctcacagcctgtttaataattgaactcatttttatttgttcatcgaatgtgtttggaatgcctactatgtgccaagcagtgtactggctgctagggagacaatgatgaatgaagcagatgggttttctgcccttatggaagttagattttggtggaaatgagattgattataattttcatgaacacttaggaaacaaacaggatgctatgcatttgtaacaggtatacctagcctggcctagggaaagttgcctgaggaagtcacgagacctgacttacatgagtgaactgagcaacagagataggtcaaaatcatcccagcagacagaacggcccatgaaaaggcctttaggtctcaagaagaggaacaaatatgactgcaatggactgagcggggggatgagccatgagctaaagctagagacgtagctgggacctgactgtaggattgaaagctgagtgagagatttggatttatttcctaaagggaataggaagtcatcagttagtttcaaatagagaagtgaaatgtccaaactgcactttggaaaaagactgctacgaagaatagattggaacaggacaagagggatgcaattagaagagatggcctccgggactgggtggtctgggtgtaaacctgggttttgctatccattaactctaccattttaggaaagtgtgttaaccttctcaatcttctgttttccaattgacagaatagatgtaataataattcatgcattatttgcatttctatgacaactaaatgagatgctcaagataaagcccctacagtagcatctagtttgaagtattagttataaaaaaagtggttggtgactttatctgggaggtcgtagcggggatgaagagtggaaggtttaaaattgttaggaggcaacatccataggacttggtaattagcaaaatatagggggtcagagaagtggaggatgcaagcttttgttttagtaaaatacagaattagtttaatttgaatttcagataactttttttagtctgagcaaatgctgcatgggctgcacctttgctaaaaaatttcattatttgttagaaattcaaatgtaactggcttcctatattttataagtctgccctaccaaaggtacctcagtgttctaggcaaagcaactgaatgactggtaatatctgttggaatggagctgattagaggaggtcaagttttttgtagaaatattgaaatattgcatggtagattttaaatacattgaattgtaggacctgggaggcacccaagtccaatgtagataatttactcagtttttctttggtcataattgacacactgaaggacagatataaccacatttgtattgggaattagtgccttggtagagtattctgtttttctgtgtaatcaattattatgctttaaataaaagagtggataaaaagtatatataaaacttttaatttctttatttctaggtttttatatttctccaggcaatgccactggctgcctgccatgctcatgccatacaactggtgcagttaatcacatctgtaatagcctgactggtcagtgtgtttgccaagatgcttccattgctgggcaacgttgtgaccaatgcaaagaccattactttggatttgatcctcagactggaaggtacatctttataagctttaataatttaactctttctttagcaacagttaactttttttggcagttgcaaagcaataacttctgtaaaaagtattttttttgcccggcttggtggctcacacctgtaatcccagcactttgagagaccaaggcaggcggatcacgaggtccgaggtcaagaggtcgatatcatcctggccaacacggtgaaaccccgtctttactaaaactacaaaaattagctgggcaaggtggcatgcacctgtagtcccaactactcagaagtctgaggcagaagaatcgcttgaaccgggaggggtaggttgcagtgagccgagatcgcgccactgtactccagcctgggagacagggcaagactctgtctcaaaaaaaaaaaagtgtttttttgttattgatatgttttttgttccgtgacatccacatttacttaatgtatgctaatctttgaatatttcctagagtgggttgctatatattgatagatgtggcccatcctagcatctgggaatgttgaatgagataaaatatattttctctcaaaaagctgagagtctggatgtggagaaagacaggaaaagacatatctgaagaagaaaatacacatactcatactttctctctctctctctctctctctctgtctctctgtgtatatatattatatatatatattatatatataatatatatatatatatgggatatatgtatgtgctttgttcttcattgcccttgaatttattgcatatttattagttcattgcatctatttatattttccttgcgtttctaatttagctttaaagactggcagatgagaaacatagctttgtattctgtgatatgatttttttcagtatgtaaagtatattatgaaagtaaatcatttttcaaagttacactctctttaatattctacttcttattctctgggtatctgtggccatttgccttcactcatttgtgtttattgctgtatttttgaagatgtgctataatgccaattctgtgtctgtgtgtgtgtgtgtgtgtgagagagagagagagagagagagtgagattatgagcttgtctaaagttcagactaaatctatgaattctttgaagctcctatccctgagaagctagtagtgtgtgctgaactcagaaagcatgtaataaaatgagtcaaatctgtctctcaatatgtgtatatttataaatctaattgctaattatttcagggtttgtgattatctgggctcttttaaactcattgcccccctgctgcctgccttttggctgttccactcctcattaacacctccattagagggtggacaggtgacagggtaattactgaaaaagaacttaaactagttcattttgactttcttttaaaatttgatgtgatttttaaaaactacaaaaatcatttaaaattttattaaaataatttttgttttcttgacatacatgcatatattttaatctgtgacgctctacttctatcaccgtagaaatgttaccttgatggtctgagaccattgtgactcttttctacagatgttattataaatcatctaaatgagtatacaaagcgcatggtacagtaaatagtaaataaaaagcactgtcaggattttgatagtaaaataggagccagttactgcacatactagctcctagatgtaatttttttgaaataatattctacagattccccagttggaactcttgggctggtttgtttcactcctggccacctctgtctttttcatagttctgaccacatttaccaggagaaaaatatcttccccaacccactgtcctccttgcaacactcattcccatcagtgccattttgtgacattcaattacccatttttgttctactcatcccctttgtcagtcttcccagggttatcagcaaaacgcctgctcagtgacctggggatgtctgattgtctcagctttttcacttaactttttttctttaagtgagatctgattcccttcattacactgcttcctctaccctacaatgttcttaaattcgtggctgagccttttaccccattctgttcctctcccattatctacccatctcactctcactccccaccttactttagtccaggaacaagaattgcttaataagtactgttccatcacctgtcactctgcagtaggcctgactagcactggagctagattccctgggttagaaggtggatttaaatgtttacataaattgataaggaataggaaggaccaaagaagtgggtataagctacatttttagaagataccgaagttacaataaagaaagaattcagtctaggcactatggctaactcatgtaatcccagcactttgggaggctaaggtgaccagatcccttgagtccaggagtttaagaccagcctgggcaacatggcaaaaccccatctctgtaaaaaataaaaagttagccaggtgtagtggctcttgcctgtagtcccagctacttgggaggctgatgtgggaggactgcttgagactggaaggtcgaggctgcagtgagtcaagattgtgccactgcactccagcctgggcaacagagcgagaccctgtctcagaaaaaaaaaagcaaaaaagagagagagaaagcagacttcagattcgcaaaaagaatgaggggcaggttggagtctagaaaatagagctaaagtatgagaagctgagtagatttctaaaaatatgaatgattcagattaagtgtggggttttttttttggacagagtctcacactctgtcgcctaggctggagtgcagtggcgtgatctcggctcacttcaacctctgcctcccaggttcaaaagattctcctgcctcagcctcctgagtagctgggattacaggtgcatgccaccatgcctggctaatttttttgtatttttagtggagacagggtttcaccatgttggtcaggctggtcttagactcctgaactcgtgatccgcccacctcggcctcccaaagtgctgggattacaggcttgagccgagtgtgtgttttaaacaaaaagatccacaagttttatataaatgagtttggatatctttacatattagttggctcctgttatattgatgggggtggtgagattacctttttaaaattacaaattgtccttggaaatggtcgcacttttcttccatccctgtattagtccgttttcatgctgctgataaagacatacctgagactgggcaatttacaaaagaaagaagtttacgggacttacaattccacatggcttgggagacctcacaattgcagtggaaggtgaaagacacgtctcacatggtggcagagagaagaaagcttgtgcagggaaactcccctttttaaaaccatcagatatcgtgagacttatttactctcatgagaacagcaggggaaagaccctaccccataattcaatcacctctcactgtgttactcccacaacacatgggaattgtgggagttacaattcaagatgagatttgggtggggacacagccaaaccatatcaatcccctttgttcttatctttccagttccaggttttccttttcagagggattctatttttctcccttttctaactcctgccattattttaaactactttgacatgtactgatgcagttctttggcctcttcattcattccccactccagcaacccatttccatggctacaccctggattttgtgatcacttataatttctctatttctcaaatcttcctaatcccatgaatgctattctatggatatatcacatctttccaattccaattcaccctggaagcctcacataacctgctccttaacttctcttaatctttatcccattatccctccttaatcctcttttgatcaaccccatccctaacttcactgtcttctacttctagcctgaggcaaaacctttttaattatgacccttttgagtacctgattgtgggctcccttctgctgtactgtggggtcagctccagagacgatcaccctacacctgccctgatctgtgaggacgtggggaaagatcatgtgcctatgctgatctgaagcactaccatgtatgtacttcttatcaatttactttctttccccctttaaactcctaccagtctcctcagttttaattccatgctcttgcccttgcagataatctggccctctgctcatagacaaaataaagccagatatatgtatctccagattatcttttctccacctccagcttgtctacattgtcacacatttttaattttttatctagtcttagaagaaaatcctgtgtatttttgcctaaaaataacctgttcccagtccttgatatgatcccttcctgttttcctactcttgttcctccattccatgatctttgctccatcaaatcctccctttattttaactcaaacatctctctataggtaatatcataactgcctacaaaaatgctattcattctacaaactccttcctttgattctgccctgctttatgagccctgaaagttattgtctaatctctcactcttcattcacttactaacatttaaaaagagcactatgattcaagaaaacatgatttaaaaaataaaagatcagattttttttcttcttcattttgtttctttctcattcattctttattcaccatgtgtggtacatacatgttagcagaacatacaagttagcagaacttgcaacatgcagacattcaagaactagttatgtgactattaaattctcatccaaatcaaagacaaggtctataaagagatataataaacaaaaatgggttaaggaaaagacagaatgagggaacaggtttcactggtgggaaaaagggaggggtcagtggtgctttccacttgagtccagtgagaaggtcttatttgatcccttgaagggtgacatgtgtctcctgcagttggagagaccagtgcattgatatctatcttagacctggcaaatctaactgagaagagacagtctacccaggtttggataggtaagctagaagacagtgccctgcatatcttagactcccagagttcatcatgacaaggaagactacgtatttctcatgaccggatgaagaccacaaggaagaaagacagggtaaggttgtcttagtctgtgctcaaagtaccacttagaagataaaggggcctgtgtagaataaaggacaagattactgtggactacaggttaataagcaaccagtcgaaaagaaaatgcatctgactgcactaaaacaaaaggtgagagatacctaatggtgagaaagatcaatgaagaagtcaggaatgtaccactgtcagtgataagtcagttttatgtatatgcaggaccagagacaatagactgctttgggtggttctagtccaagtgagtttctacccttcctgcagcctctacgtgagggaggaggctaaccaagctaccttctctgattatagacttgctgcctttatcatgtcctagcttgatgaaaggaagagaagtatgttcttgaaaatgtctgttctttaaataaagattggaatgttgactaatatacaggattagactttctattttctgaattgaatttgtattttgcaatgtaaagtaactgtaggacattctattgcctgagaaagaccagaaaagccaagtgactaactcattttatatccacatggaacatgggggaattagctccatattatatgtttaaagggtcagtgaaagacaaaaataaaactgatttatgattgcttctcatgacttatggtttctcaatgtgctggtcatttcattgttcccatttatttcttaaaattacctcttcctttggtttccaagattctacttctcttatttgttttctaactctttttttggctactcctttttaatatgtcctttcaatttccacaactgtgtccctgatttcaaccactacatacatgttaatggctttcaaacacatgatcacccattcagatgcctgccacgcactctaggcctgtagccagctgtctctctgagttttacgcttgcaagtccctcgtgcatttcatttttaatatagtcagcacagaactaaccattacttcctcatctccacccaaataaaaataagtcttatgccatctcatgctatcatcatcttggtgaaaaagacgtaaaacttcaaataattattcaagtccaaacttcccaagtttgagtggggcttagattcttctcaggtttggcagaattggctctgttgttgagtagaatgagtctacaggctactgctggaaagtgctatggaaagcaagagctactgtatataatgcagcttctctaaaaagaatagaaagaataaagcttcccatggccatatgggacccaaggagatcagcaggatttgtctcttactaaatcagtcgtgtggaatgctggtaacttgacttgaccctcctatcccactgatgaattcagctgtctcttttcacttcaacattgataatcattacacaggaaatcctgtagcacagaagggcatggagaaggatattttaaaatgtgacaatgagaattgcttgagtttggacttttgttcaacattgaaaagagataaaagtgggttctttttaatgtttttccattcctcttttgaatgataccgttcttgaatctttttttgacttctggttgttattgtatatacaccaacattggctatattgaaaatgtgtaacaattgactaagatatatgggattccatcaagtataagaaatttttgttttttaaaggaaaaaattcacatgtaatgtaaatatatacagatatgcagtataggaaaacagctatgtcctaatgttaaaacaatgtttttgaaaacaaagtagattcaaaatcatttgaatctactttgaaatctaggcactgtggtaggttattacaaatagaaatgtttacatttataaaaattacattccaattataacaaatggaaattaaaacattaattttcaaaatatacagtagattataagtaacttattattatgaaaggggaagatacaagtatcatattatttcttcatcaacttggaaaataacctcacttccttatctgcctggttcacatattccttaccttcttcatgctctatttgttggatatagcaaggtttgctatattgttttctcttggtttatttgctacacagttttttgtattcccaagggcaaaataaataaaataaaatagacctcggccctaaactacacaaccaacaacaaaaatccaggcaacacaacaatgactttttgtgaccaagctggaaaatcatttgcctgtttccatctaagtggtttattcttcaaaagttactgaccagaaaaagggggcatgtattttaaaaagctgatcctagtgcaaacattactccatttacctctgacacataaagcaaacatgatttaatcagtatcgaaaacaatgaagcaaaaaaaatctgcccactgaaaaatcaataatgcaaaaaagtatatagtgtttgtctaacccaaaaacaatgagacaaaaatgggccatatttaattcatctcagttggtagtggagacccatatttgacaccctgcacttactggcactgtcctcaagttgacctgtgactatgactactctcccccatagcccccaggactgctccagttcatctggtaccccacagttttcttacataacaaccacacatcacaacccccaaaagtttcttccctaatgatataccctctctatattctatgttaccttgttttaagccttaaggagttagtggtatcactatttgtcccatttactagctgacacacactgaagttgtccatagagggtaggacaccaaggctggttagggagaataaaggctcagacttctggagcataaaatacagggaagttcttctatgcccagattatttttggttttactgcaaatgttctacatttcagcactaggttatagatttggtccagtaatcttttcacaggcctttatccgattgatctcaattggtcttttctctgagaaccaggtcaatgacttcagatgaaagcagataacttccttgtcaactgatttccttttatggtgtgataatggaaaaattagggagtgtgcctcatagattccctctcctcagtgactctttgtcagacagctggctgtcatctggggtgacagggtaaatgggccacaagcctgtcatcatctggcagccaaggcagggctttctcacaaggcagtggcagatttccaagaaagaaagcagaagcatgcaaagacacttgaggcccgaaccgtcaggatgttacttttaccttattctactggccaaagcaaggcacgaggcttaaccatgtttggaagtggtggggaataaacagactctccttttgatgagtagaactaattatacagttagctgcaaaggacctgcacagagggaaaggtgaagagttgtgatttttgcaatctcctatggctgccaaactatatattctctcttagtatagatgatatatgatctgataagaagtatcagtttttatatattagtagcatttattcaacgtgatgtaataggaataacatgcaactggacatcaggatatccaggtttcagttttgtcttttccactagaccagatacagtagcttcctattattggtggaataaattatctcaaactcagtggcttaaaacaacatgaatttttattatcttatagttctggaaatcagaggctctaaatgagtttcactaggctaaaatcaggcctgtgtttcttatggagattctaggaaaaaaaaaaacatttccttgattttcccagcttttagaggcaacctacaatctttttttttttttttttttctgagatggagttttgctcttgttgcccaggctggagtgcaatggtgcaatctcggctcaccacaacctccgcctcctgggttcaaatgattctcctgcctcagcctcccgagtagctgtgattacaagcatgcagcaccacccccagctaattttgtatttttaatagagacagggtttctccatgttggtcaggctggtttcaaactcccaacctcaggtgatctgcccgccttggcctcccaaagtgctgggattacaggcgtgagccaccgcacccatcgtacattctttagctcatggctccttccttcattttcaaagccagcagagcagtgtttccttggacctctgcttatgtccttacatgttttctctctgactcttaccctcctgccttcctttataaggaccgtagattacattgggcattcttggataatccaggataatctccccatctcaaaatccttaaccacatctgcaaaattccttttaccaagtaaggtaacattcacaagtttggaggattagaacttggatattgttggcgtgggcataatatgacctgctctaccagagttcagcaatctatagcctgggggtcagccacatgtttatgtaaatagagttttattagagcacaccaatgttaattctttacatattttctgtggttgctttcctgctacagcagcagagttgagttacaatagagctcatatggcctgcaaagcctaaaatatttactatctcatcctttatagataaagattgctgaccttgtaactagatttactgtcaccttggacaaattagtctcactaagcataatagaatcataactttatagactgggaaagaaccttaaaagtaattttggttaaactctaccctatacatttctctgcgtaaatcaccttttcagaaaaactggtgaatggccattcagcttctgctccaaaacatggaactaaaaggagctcactgtctcatgaagtagctcatgtttatttcaaacagctgtaattcttcaacaaatagaaatatattatttatattgaccaaaaagttgcagtcttttgactttcttgcctagtcttatttatgccttctgagaccatagagaataagtgaaatctctcttctatctgtgagcactttaaaaatttgattctgctatcatatctgaaagttatttagttatttgcataaatatgtggagtgtcaacaaaggagaaagagacagtgttctcagatcagaaccttgctgagcaagctgcctggacttagctgtcactattgcatggatgcaagggagtcactgcccctggtccagcttttatgagtttctctatttgtgcctgggaaattcaccaaagagggtggggttgcacactgttaacgtctccctttcagatgaggcactcgtatttccttgttcaataagccatgtaaatatggctttcagttcacacagcgtggatgcccaagcctcaaatccctctcctataattctgattccatctccaagagaattcagatgctgttagtagtctgtaactaaagcgaaactaagaagctcaatgaaaccacagctcctctgttaatcggggaaaaccaaactcctctagagggcactgtagcactcaccgaattctgtgaactgagaacactggtttaagagaatctgaacagataccagctcttaaagaaaactgtccattccctgggagtgaggttagccagggggacagagttaagccaataaaaaggggctcaaaagagctaacttgttactagagctacaaaccatgtttggattaatctccggtgtcctatcctaagtctaaagcttccctggtgctttattcactattaattcctgtatccgacaatatttactgaatccttactgtgtgctagcctttgtgttagggactgatggaaaaaactaagacaaaaacaaacaaaaaaactctgccgaatttctccaatttgccttgaagtctcattctcttttgtttattaataatccttatctaaaatcccttagcaattggagatctctttctccttcgttctttatgttgaatgatgtcttcatcatccccattagcaagttagaagaccgggagtaactttatacctatcctcccttctcttttcaattcggcctcccattctaccaattttacttaacatttctcaggtctatcctactcatttccattgctccttgccactgccccaaggtagcattatcttacttctgctcacctttccaggtttatctatcaccatttctcattatgaatttacatccaggagtactgaggtgcttgcaatttcataccctcttctgctttttcttttttttctctatttttgcccctccccgacttccctggcttatttctactcatcttttaacgttcagcccaagcatctcctccaagacttctacttaaaattacccttcccatcccttcttctgctaccagactagttaagttgccccttttctggacctttagagtctggatacatctttattaatgctgtttccgttttttcttgcatacgagattgtgagctccttgaggaccggggcaattctataagattcatctctacatccttgatgtttattccagtcctggaacatagctggccctcaatgaatgttatttatgtcaatcaatatttaaatcaatttgatagtacccatgagctgaggccccatagagaggaggggtgtacaaagagaaatgtcaataaattgacctatatatcttgggatatatctctgggcctcctacagcagttctccctcagatgatgaattttctgacaatgatgtgcattactgaaacatattcctttcattaatagttaggtttcaacagtaataattaggataaccatttctctcactgtttccacaactggaagaaattcctaagaaaggaaggtatatgaaatttgtgatgtaggagacagaggccaacttctttcccattgtaaccagcaaatactgagttatgtaagggtccaaagagaactatcatagcaaagtgctggcagagattagtgatgctttactcctgttttgtttaccataatgaactggtcaataaacatcacaaattgtttatctatataaatcttgacagattactctttatgaaatccatttagcaagcgaggttttcccataaggatgaaaaatgaagattttaaacagattgcgggagaagctctggctgtaccaagagagtcagtgtaataaaggtttctttatattaatattacaaaaaccatttatcctggcaaaatcaatattgcaattcatcttagtttggtgtttctctttctaagcttaaaatgtcttttcctttattatgtataattttgttttaataaatgtgaaatatatttcatttaggaggtactcttgaggagggataacttataaaatgacatcaaatttgtagcttatttgctaaagagtcttggaagtgtttaaaattatatttgagtggctgagaaatctaaaggaatcattttgcttaatccttaattacaaaattatccctgtgtcctttggggtaaaaacaaactacaattttcagaaaagtcttcgcttgtgaacttcatttaggaaaaattctctcttactgaagtcaagtgattataacaagtcagataagttgactataacaatggcttggataagagactataaaatcaagaatagacacatttaattgctcaaaacattgcgtgctttggctggaagaaaatagaactacatcaaggaacggaattatgttatacattggaagctattactctaaatgtactgtatgtaaaataagtgtgattgtctcatgagtgaatggtaataaaaactgaaatactcaagagacacttattcatgagtggtgcagttacacatacatatatacacacacacacacacacacatacattgagagaagcttttctcttattgtttatgctcactaatattatattaaaagcctataaacaatagactctacataatagcctataaagaaattaagagcaaatcaagtatttttgcatctataattccattttaattataatacataattttcttcagctctaaaacttaacctaaacaaaacatctatttgaaatggaattctgatgtaatgtgtatagataaaagacctaatatagttgtttgaagggggaaaatgtccttttatcatgaccataaaaacggcaaactacagtacagtggttttcaagaaaaactgtactttatttattcccaaggggatattagtccataaaacaaatttgcagcttatttggcagtcttagcttttatcagcctttttaagggtgttgaatgattacccaagagatcacactgtaaaaatggcagtggggaaaagtaactccatccgttcagcatctttattagaatatataggtgaatccatttgatgttgttttaaacgtaccacaaggagagtaccttttaaatggtgagtggtcttcttacatgtgctgttttgcttctctaatacctcatggcaccaacgttgcttatcctaattagtgccattggcataggctacatgtttgaataattcactgtgaagaaacaagttttagtttctatcatggcaaaatgccactactggtatttttacaagcaactttgggtccaagaaatttaagttgcactaaagttatcttactatatttatgtcattagcatcttttcataaatcagaataatgctgtattctccaaccattatggataactaagtttagttcataaaacagaaaatgaaatataacccatattaaggcatcaaaaatatttgaacctgtctttctcaagcaattttcttagtgaaatttagtcttcatcgaactaactatagaattttaagatttttagggagagcaatgatttacccctgattttctatttcgcaattggagagtcacttgaaaagataattttatgggtacctaatctaaatgtttagctgacaggaacactgcttttgtaaaagcaaaatttacagcattcttaattgaacaactggattcaaactaatccataagatatattgtgggatgtaaaaaagcaatataatatctttttttgctattaattagtttataaagagaaagctttatacgggttttaccaggaacagtagttttataaagatcttttctattttcctttattttatgttgattctttgtttgtttagctcaagcattcttttcaatatattggctaaaacaagccgtcttactctacaatgctattggtaggtgtaacttatactatgaattattaatcaaaacactattctctttgatggtttatttgccttgttttcagatgtcagccttgtaattgtcatctctcaggagccttgaatgaaacctgtcacttggtcacaggccagtgtttctgtaaacaatttgtcactggctcaaagtgtgatgcttgtgttcccagtgcaagccacttggatgtcaacaatctattgggttgcagcaaaagtaagtgaactctggttcagtgctggtgtgtgaagcagcatcatacaggggactgcatctcattgttttctttctccatttagaacccatcagaaaggcttagtacaatgtgaagaacgtaggtaagagatggaaaaaaatacactgaatgaaatatgtctgcttttccttgattagacaattggaaatggtaatataattatgttcatggtgggaaatttacaatagttttttggagtgaaatcaacaatgaggtgattaaagtcctaggttttcccagaccaagggtcttcccaggacacaagacttttaatggtaaaatcaggactatattggttaaaccaaaacagttggtcaccgacacaaagacatttccaggtaagttatttttttttgacaaataaagggtgaattcttgtttattatatgtttgatattcttccatcccccaaattttgtgggcagtattataccattagttgtttatcgatattgtaataattagtatcattcgtcacgcatattattcatcccataattcatgtttctttctactttaagtttcactcatttaaatatctctcacatttatatttttaattccttaaagcctaagattacatgtaagtatcttttgacttttcaacatcgcttttcagtaccttgaattgacctcacaaggtcacctgcagttctacaatttcataacatattgaccgttttcctatatttacttcaagatcatacatccttaccctttccagaatccctaagaaatgcctgctgggaacatgtggtaggagccctctacaacatattgtgctatgcatattctccttggggtgtcctgagactgtcatgagtcacaatgataggaaacgccacaagtcatgacagatcatcacaaaccagcatgcctggaactctgctatctacatttaaggggggagggagaaagataagtaatgggatattggactccacaacaactgtactagattttgaggtaatggaaagcaggatatagctagtgattaagaagacgtattcatattttgtacctgtgtagtttctcttcagcatcccgcatttcatcagtccctctggatttcagtataagtaaaactgtaggtatttatgcttcttttgggaaagaactgtcataattcctttcatgtataaatacagtctaaacataaatctggacttcattggccacttaattactatgtgtcatttattgattagcaatacaattgattgctttgtatgcaacaaaaattctagcatattccttttggatatgagttatggatcgtcatttataatggaattacaatacctaatcttagtgatttctgattggttctgccactaattttgtgacaatattggcacctgctctactttttgctacctattccttcttgcatttgagacatagtctgggaattatctctcaggcaaaactggatagtcatgtcactggaaagctagcctacaactcttagtagtggtagacatttaattttatgttttattaactggacattctttccaagtgtttctgatttgttagaatttttaaaaactctcacattcctaatgattcttccctggacatattccttttggttttttatctctttaaaattatgatatatcatactgagcacagttcttcaactcttgtggttgttgctgcttctgttttaggtttttatttaacaaaatttttgaaacactgtgtaaagttggaagctcagcatcagcagaggcaatttattagaaacaaatgagacaactttcctgccttcagaggaggtcaaaacatagctagagtgatggacactgataataggaggggagcagaaaaatgtaaatggtgggatgaggatgaagggtcccagccttctctcctgttccagcttgattttcacatggtacttgtgtttgatcctagcagaagccagccagaacaattggcttcacaaagatatgatgaaattgaaaggaatgtagtgctatctattgctgacacagtgaactacctctgactagtatttgtctctgtatccaacagatgtcaagaaatattttcatttaaaattaaaatttctcatggtaccccaccccctacacagtttgggaactgcaggattataaccctcattatatcttctaggggccactagcaataatttagtaatatcatctgtgatttttatttttggtgggctgtcagggtgggaatcctaggatgtaatttccaaaatgcaagaggattgaatgaaaataaagtagttagaccttttcttatagtaaatttcccttttgggtgattcacttctttcctttaaatattggtatcatgctttcaaaatgatagtcattcttcttgataggaagcaaaacaagaattaacataaattaaatagtcctattttctgtatgctttcctagcgaatgatattctagttagttcaaccatctatgaacctaactaaaattatacacatacacacacacacgtatacaattagccacttattgtttgatagtgtttgtcttcttgacactattctcattgttatttattcatctttatatccacattttttctttatctctccttgccagagagcctcttctagctctccttttattaacagctttattaaagtataatttacatattatatatttaacaattttaagtatatggtttgatggattttagtaaatttagacttgtgcaatcattactataatccaattgtagaacacttctgtcatttcaaaaagttcctttgtgcccatttccagtcaatcatgactcccacctctagccccaaacaactagttatagggtctttgatgagataattttgcctttcccatgagttttatataaatgaaattatacaacatttagactttttgcaatgtataggcttttgtatctagcttcatcttaacaaaatgtttttgaggttcagtcatattgttgcatgtctcagtagattcttttaattgctgagtagtattttatggatacactatattttgtttatccattgatcagttgacatttagattgttttcagcattggtctactatgaataatgcatccatgaacatacagttacaagtctctgtgtggacatgcatctttatatctctttatatcctgagaataaaaaggctggtttgtataccaaatatatttttaatgttttaggaaactgccaaattattttccaacatggctgtattattttacatttacattagcaacttataagagatccagttactctatggtctcagcaacatttggcattgactctatttcattatagccattcagtgagtgtgtagtagtatcttgttgtgattttagtttgcatttttcctgctgactaatgttgaacaacttttcatgtgtattgtcattcatgtgatttttggcaaagtatctttgaaatattttgcccgtgttttagttgttagtcctcttactgagttaaagaattccttattaatttgggataaaacttgcaaatagtcctctcattctgtggatttgtttttcattttttttattggtatactttaaaaagcaaaagcttttacttttcatgaagtcaatttaccaagcttttcctttatgggtcatgtttttgtgtcctatctaagaaattttggattgactcaatgtgaaaaaaaaaaattctccatttttatcttacagttttatacttaaacatttacatttagatccatgaaataatttgaattagttttgtacatggtatgagttaagcatctaagttctttatttcatttttattttttgacacataggtatccaaatgttccattaacatttgttgaaattgccatcctttccccattgaattacccaagcatctatgcaaaaatgcagttgaccccatagctaacatcatattcaataatgaaagactgagatctaagatcagacataatacagaaatgcccacatattagccagagcaggtaatcaagaaaaagtaagtaaaagtctcccaaattagaaagttgattttctttacttgtagatgatatgattctatatgtggaaaatccaaacaaattcacaagaaagctactagagctagtaaacaaattcagcaatgttctatgttacaagatcaacacacaaaattagttgtgtttctataagccagcaatgaataatttgaaaaagaaattaataaagcaatttcacttataatgcatcaaaaatttaaccaaggagatgaagacttgtacattatctgttttctgtgtttccaggaaacctatagtataattgcgcaatgttatttctatgcactgttccttttatgcttagccatgtgctctccagtgtctcatgagtttcatgcaggatctgtgtgtgatcacttttctattaggatgctaagatagaagtaattttcccattagtatatattatctgtggtaataaatatattacttattgccaaataagccatttataattcttgggatgtaagaatcaaggatgccttccagcacactggagggtagaggaaataaaggtgatatttattgaacaattactttatacacatatacacacacacacacccctacatacatatgtgcatgcacacacacacacacacacacaaacacacacacaccttatcttcaaaataaccctgacggggagacattatcattctcttaatataaatgagaaaaggttcagagagtccaatcaatatttgactataatcatacaactaccaaagttccaaagctggagattcaagctggtggttcccaaagagatggatctagtcacaatattatactctcatcccataaaagagagtctggcatatgcaaagaccattcttggcaattttgatgagtgaatatgtgaacattttttaggaattctacttcaagcacataaaggttcaagttctctcatgctcaagatttaataatattattctcaaaagtgttggtaagtcatctaaaccttctggcttatgaaaatttcaacttaaataccaaagaggtactatttatttatgctgtggagtcagacaagattgtggttgacatggtcatagcaagtaatcagcttaaatgtttggaaagagcctctgtgtgtgaagaacttttgttgccaaggatattttcatgtaatgcaaatcattttctacaccctttgacatgggagtgaaacatctatctctctttcattttcattcatccccaaagcattttgctgccttagaaaatcatctgaaggtcagttttgattgctctaactctgaaatctgttgtgttcctgatagcatgcagagttttagatgaaatcactaatattcactaaaaaatgttaaattaccatgaattgcaaggttctttgagagtgctgtaaatgaggcagttgatgatatttgtggctccaccaagaacaacaggatttaaaaccctaaattaaaatccactgaaagggtcaaatgcattttcagtgttcaaccgatcaaagtgaccatatcaaatatggaaaattcatgaattcaaaaatgtaaggtgttattcggaaataattcttttctcatgtgtcattatgagattgttgctactcttttcctatgtctaaataggcatatagactgttggaatgttaatagaacaatgcaaattccaaagaagaaaaagacaaaaggagggcaatgagcatgtatctagtttgaatattttaaaacatatgatgtaaatattatctgccttaggatcagactttgtctttaggaagcctattcatagtacatggaattttatatattttacattcagtgctgtgcagaataaaacaacattttccccctctgttctcacaccaccatcaacatagttgaacaagcaattctgcagcattaatatcctacaatccagttcaactcttgcgctatatacctggaagtagtggcagattccacgggtgaggggtcagtccccaaggctgcccccaacttctaacaccaatcacaagctccaggttattttgcctgtgcttgtaacccactggctataaattggggctcctatgactccctccttgggttcaattactttggcagctcagctcaaaataaggaagcacttatttttactgatttatgatacaggatattgcaaagatacagatgaagcaatgcataggacaagatacgtggaaaggggagctgagcttccatgtcctccctaggtgtcacaccctccaggaacttccacgtgttaaactacatggagctctccctgtacccccaccaccccccaccaccccaaacaccctttttgttgttgttgttttagacagagtctcgctctgtcgccaggctggaatgcagtggcgatcttggctcactgcaacttccgactcccgggttcaaacgattcttccgcctgagcctgccgagtagctgggattacaggtgtgtgccaccatgcccagctaatttttgtatttttagtagagacggggtttcaccatgttggccaggatggtcttgatctcctgacctcgtgatccgcccgcctcgaccctttatagcaacttcattggataggcatgactgaagcatggatgtggcagactaccacaattactacttgagaccatcactacaacagttactactgttactatttgagactgtcattacaagactgaatgaaggaggatgaacgcagaaatgaaaacttaaaacaaaaataactattttacaggaagggtaacatggggaagaagaagaggggtccctgcttcttgtgagcaagggcagctgcctgagctgcttcagcccttcatatttattgggtagaaagagcagggaggaggagggcatgattggtcagctgcttgattgatcacagggtcatattattactaacaggcttcagatttgcctaataacaagaaacacttgtgcctgggtcatgactgccctcagcattccttccgggtgcagacgcagtttgtcagcttgccaacatcctgctttcatgagaacagtttgctgtttactcatatagcctccagtggtatacttagttgatcacgaccctcattcttttggccttcaacacatggacaactatgtagaaatgtgatttaaaaaaaaaaaggagtatgatttcatactaatcgactgagtggggaaaccctgcaaggctgcctattcagagtcttcttggcctctctctgcagtattcattcctccagggcatggggcaggactccttctaaaatgagggtctcatgacccacagtcagacaaggtaggtcagagaatttccttatggccggctctaagacagaaaggtggaggaacattagagtatatttttagtttccctggcctgccttggggagaaaaaggaacaggtagaagcagaacagaacagagacagaccctattttctgaggcctacttctgaagcctaaatctccccaatattgtaacaaaagactgtccttcacctgtatcactcttaaattgttctgaagctgcttcaggacccttggataaaagaccaatacttcaacaaaagataggcttattgtgttagtcaccaaggaaatagcaaaggctatggaagttatgagccaggaaccatggacaaaaacgtgtgtgtgtgtgtatggtgtataaatatcaaagtgctcttgaaatcctgtcttaaaatgtaataatttgattatattatatcttttagacagagttcatatattatatctattaaaaagagttcatcactcatgggtcctggtgaattagcaatagctctggggtggaagtctttgcttagtttgcagaataacttcactttactgttccctacttttccactttgctctgtcctccaagattctatgtggtttgcatcagcagcctccattgccctctggccatcagttagttgatttcagctgctaagagggacccaccaaacatctggagggcaggtggaaaaggaagtcaggatatttaattccccgctccctgtgtccatgtagaagcagcctcaagctaactgcatccctccatgagtggtcatagctcctgtcaggtgatgctcttcatacagtcatttctgtccctgagttctgtccccatttaagctagagatagtgtgcagagaagagttaacatagcaagcctgactgcttatttttagaaagacctgcttacaaagttggcctttggctgacatctggatccccactatccccagaactgataagagaggaccactgcacttaaacatttgtacaaagtacggtttatgcttaacacctgctttccttgtgggggtcttaaatttgggtaaatgccagatagaggctgctcataggaacagcccccaataaaaaccctgtgcactgagtttctaaggagcttccctgattggcaacacatcacacatattttcataatgcattgctgggggaattaggcccattctatctctactggaagagaattcttggaagcttgtgcttggtttcccctggacttcattgatatgccttttccctttgttgatgaattctgtaacatttcactgtaataaattttagccatgagtaggactatatgatgagtcctgagtcttcctagtgaatcattagacccagggttcagggttggcttgagaaaccctgacataaatagcaaaagagctctgcagttctgtacctgagagtactggaccatctcttttgcccacccttttgaaagtggttcctttattgagctctccccaagttactttttttgagtgtgctttcttttactgaggcttctagtgactgtagatatttcatataaaaatattaattatttgatggattcttttctgtaccttacatttacatatttcttaacaaaaagatgaatggtttaaaagtaaggtaacacagcaacctgtacccttgacatcttatttaaggagaatgtttgattaggttgtgcttctttaaatggatgggggattgtgcatcttgtttaaactagaaaatagtacgtaaactggtggttgattgtccctaaaaatatttagctgttgtttttctcctttatctttgcgtattctggtgaaaaaaaagaaaattcactctcaaaagcagggagactaagaaaaatttacagtgacagaacacaatgttttcatggtatatatttatattatagaaaacatcacttaagtagtgagatgaatgttcttatttcttatgtgcctgataagcaattgtattacatcttaaaaacacctctaacaggtgatggtacattcatatagtatattcaaatcgtttcttgataatatttagattatttaacatccatagctatttatatcaccaaatattattctttcttttacactgtgctctctgaagcaagataaagcattgtgcttaatggaatggaaagcttcctctcaaaaacccaaagattatgctacttaaatttcaagtttcaatggaacttatgtcaacttttaaattaactatgtaaaaaataaatgttgtgcatccttggatggtttctcaaaaaaaaaaaaaaaaaaggcaaagaaagaaatgcttaatgtaaactatggtggttttttacccccaactatatttatgccagctgctttgacctaaaaagtttttttatgcttatagataaaaagctttgttttagagaactcatgaaccctttgtttattaatgtcttggtaaaccacatgtcttcttgataaagcaatcctgaatcagaaagacctctttgctggatatcttacttcagtttgcttttctgtttattgattgctttgctaataaatgctctcttcattgtaatttagctccattccagcaacctccgcccagaggacaagttcaaagttcttctgctatcaatctctcctggagtccacctgattctccaaatgcccactggcttacttacagtttactcagggatggttttgaaatctacacaacagaggatcaatacccatacagtgagtttaagggtttggtaatagaaataaatattctgagaattgacacattagttaagttctttgacattgaggataaatgctgttgtggtttcctctgtctggcacagagtgtttcaaacagagataaaattacaaatttcactagtaatcaaagaaatacaataaaaatgagatgcttattatctgataaatactaatgcttatcacattctcaaagatgaaaaaaaaatgaccccatcaagaattgatgggaatgtggggaagctggaacttttataaactgctgaggtgtctgtgtgagttcattagtacaacttttcatgtacaataatttgttaaaatctatgaaaaaatctttccttttaacataacatttgacttagcaaacttattttaggaagtttatctcaagtgaacagtcattaagtagacacacaagatgtccatacctattctatttgtaacatcaaaatattgaaaatgattcagatgttcaacaatgtttcaggaaattatagtatatggcataacagaatcctggtacattgttaaataaattataggctatgatagcatataaactgataccttagttcacatatcaataaatggaaaatgttcatgacatattgtttaaggcaggggtccccaatccccaggctgtggacaggtactggtctgtgacctgttaggaacaggaccacacagcaggaggtgagcagcaggccggcgacattactgcctgagccctgcctcctgtcagttctgtggcggcatgagattctcataggaacaggaatcctattgcgaactgtgcatgcgagggatctaggttgcacgctccttatgataatctaataataaatataatgcgcttgaatcatgccaaaaccatccctcctcaccttcccatcctgggtccatggaaaaactgttttccatgaaaccagtccctggggccaaaaaagttggggaccactggtttaaagtaaataaagttattaaaataatctgagaattataccattttaatttacaaatactggaagacataataaatagatctagttttctctaattgtaaatattatagaaaatgtatcaaatatttctattataatgaattcaagttttttaattctcaggttaaagaactattaaatctggcagtggagtactaacactcaagcaaatagtgtaatttaatacacacattgctgtttccgcagagatagaacacagcaacataaacttttgaaagagaaaggatataaacaagccatcaagcctatctttgcctttgtaacttttatgaagattttaaaggagcttatagaaatcaaattattagaattcattgactttaaaaaacatttactcagatgttttagatacagtttccctaaagacagaatgaaaaaaataggaatttttacattattccagctctatcttctctgatttttgcttctagccatgtttagctacacactagtttaagaaacctcggaacagcaattccaattcaagtttctattttgttctcttcatttaatacacagttttccaaattctactttaaccatgcttaattagttggagaactgtttaaagctctgtcgaaacactgaaattccataaccttccttaaaatggttaggaggatgccttgttttaacattttaattgactttaaaactcctgcatcgcatagagttttattttgtatgcattatactgggtttcattttgcacctaattcatataactggaatttagtttcttatgtccacccctttctcttggctctacatgtctcttcagtattccaagtcttctttaaagttaatggaaactctgaacttcatgatgcagattgcaaagggaaatgaacatctgtctacatctgccatgttggcaaagtatcctgaaaacctgctactagaatgtttattttcttccaaatatcagcatgatccaggtgtcctgaaacttaaacttttgtgacagagaaagagaggagttataaaaatattgaaaatgattttgaagatgacagtaccactgattatttctgaagttgtgaattagggtcaccctactttccatacagcttaatgcaatagcaaaattaaacttaaaactatcaatgatattattcaagccagaggcatgatttccatagtaacatattgtgatctattttatagaacatcacatgttagtacaacattggctgtttttgacgattgcactaataaggaatccaaataacattttcttacataataaatgtgtattcattcactaatcagacatttatataatcctattaaacaaggtatcatttcctaaaaccatatttttcattaaaaaatgccacttctggcatttcttgacaatcactgtaattaatgatgtgaaaattatctgcatgatggcatttgaacagtaagaacaattggttaacactgtcagaactttgtatcattctaacaatagcctcatgtttattactctatttctagtgcgtggctagcatgtgtaacatgtaaaggaaacactacttatattcagctggatgaacacaaatctttgggttaaataaaggcattaggaattataggtggagaatcattgaacttttcaaagaaaattaatagtgttgtcttccaagcaagtttgatagtttgtttgagacctttatagaattcttttttagaatggaaactttttctagctggcctaatgtactatgggattctctaagacatattttccttcttaggatcatgatatactggtgtaccatctttaaagctttcaaattatttgttattataatagcatgcaaataatgaataattttaaagattgtgaataattaactttaaaaaacaaggtatatctttacgttttatttaaggtagaggtcaagctagcgcttcgagaatcatacataatcagccctaacagtatctctattgtagcccccttctgggttgctcataggtatcttacgtgtcataggaaggaagtgaacagttattggaggaaatagcactcttctgttagtgttgcaggtttagggagtggacagtaactcatactgttttttggtgttgttcctatttgagtttggaatcaaaggagcactagacatagtaggcagatcaaatttaaaaataaaaacgatcttcattactgatgaaagtcagattagagactatatcctttttcctgcaggaagacaaattagaagagagaaaaatcaatgggctgatctgcacataatttgctccctacaccctgactccccagattcacagtcagatgagttgttcctcatttgggatggcatgaatggggagatagcccttaaatgtcactttagagaaatccttccacaggaactagaggatgattatttttacatgtaacaatgacttctatcacctacagatattatcgtagtttaagcttagaattttagacaaccaaatattttaatgagccctgggatttcatttctacccttattcatttccatctttaaaattataatttataatctcatactacatcaagggatcaatgtaacaagtggtaagatgattcagttagctctgagaggaataaatgaagaaatataagatatagagacaggatgagaaaacagaagagaagatgacaggcaactgtttttataaggctcttaatattcttaatgcggtagtttccccttatccatggttttgttttctgcagtttgttactcatggtcaacaatgttccaaaaataggtgagtctacagtacaataagatgttttgagagagagagaaagaccatattcacataactattattggggtatattgttataattgttctattttattttcagttattgttgttaatctcttactctgcctaacataaattaaactttatcatagatatgtatgtataggaaaaagaacagtatatatacacacatatatatgtatgtatatatatgtgtatatgtgtatatatatacatatatgtatgtgtgtgtatatatatatagtttaatactatttgttgttttaggaatccactggagatcttggaatgtatctcctgtggataagaggggactactatattctttcctggaacaatagatcaaatatgtatagaaaaatcattcatgtgtttaataaaattttgttcagtgcttattccagaccagaaactgtatcagtcattagaaatacaaagatgaaaggaatagttctccttactgagtggggagacatataagtaaaccaaagtaacaatagaatatataaatgttgaagcagagtaaacttggggtgttaaggaagcacacggtggcttgggaggtgtaggaaatgtaaccatgcctgtggtggcaatgatgtgatggagaaccactgaaagtttcccagtaaagaaagaatataagctgaattagccagatactgtagttgaggaagcgtgatggtcatgaaataaattttgtattaaaagaaaataaggtatattcagcaatcatgggcagttccatgtagctttggtaagtggtacaatgggggagtgctacaaaccaggagggtatcagccaagatcacaaatcagtgctgagccaaggactgtaaatgtttctctgaaaatgcagaagtctgtagtaacagcaaattttcaaattcagtgttaaagatccgtaccccaaccaaggagagcaactaccttgagataagcactcttttaacctgagtattatttttttgttatggatcattaatggatatcctattcataccctttcaaatgcttttatatctttcacactataaattgccttatatgatattcctacacaaatgcatatttccatcccaattctatctgattctaatttcttattaagtagactgctcttgtataatacattctgatctattaggattatattccacttttcagatgctacaaacattcagcaagtactgtacttcttttaattgtcatcaggttataagtcttccaacttccagtttaagcttatgccagacaatcttttggaatattcagcactgaaatttatttttttcttttaggttttggcttttggcatgctaaattattttccatcgttgttctagccttcagtgatttttcaaattttgttaatgttttcaacaaccttattgtgggataagggtaactttaatctaatctagtaaatatttattgaaataacaatgagccacagctgcacgctctctagaaagtctgaatctcagccctaggggacttttccaaatatgatccttctttgggtgctctgccttagcactaaggatggtgactttcccctgtctcttctattcctatattctttagagttttctgtaccacttagaaagtaaaaccaggcgacctctggtacccatggtacaactgaaaacagccaccagagagagaactgtctcaccttcctcggctctatcagggtcatctctgataagacagtggccctcacctgagtcagtgcccaaggtgccccccacaacaccagcggaggcctcctccactgagcagtcggaccccagagtgctctgtaggagctgtagactgggaagaagggccgggtgtggtggctcatggctgtcatcccaacactttgggaagctgaggtgggcggattgcttgagcccaggggttcaagaccaacctaggcaaaatggtgcaaccctatctctacaaaaaatacaaaaattagccgggcgtggtggtgggcacctgtagtcccagctattctatttgggagactgaggcaggagaatcgcttgaacccgggaggcagaagttgcagtgagccgagattgtgccactgcactccagcctgggtgacaaagtcagaccctgtcttcaaaaaaaaaaaaaaaagaaaaaagactgggaatgcctaggtttacacgatgggttatcactccaaagatttgtgtcttttgtggccaatggcagatccaggaaagaaatgaaagttgccgatggggataggctgggggagagcaatacagatgtgtatgggaaaccccaacccatatatattgtaaatagatggactaggctaaacattgttgctgtttcagtcttctgcaaactcagcttttccacaataaagctctatctcctgtcggaaggaaggaaggaaggaaggaaggaaggaaggaaggaaggaagggagggagggagggagggagggagggagggagggatggatggggggaggggaaggggaaggggaagcacataaatatgctgggaccttcatattgctatagggcacccctgcttaatggaaccctcctcgcatctccaatgcaaacagccccatggcggagcaggcagcagccactctggtatttgtgtgtttcgcagtcctacagtgtgtttcctgtccttagagaacaaggatttccagccatgtgcctaatcacctccactccctatcttattttttaaaaacctctttgtagctgcttctctttgccctcacaatccttcatgcatagaagtcctgcttatctaaaacttctgttgtgtaaattcctcattgctgataacaaatgtctccaaaatttagcagcttaaaacaataaacatttataatttctgtaggtcagaaaataagaaaattttccattcaagatgttggccaggtgacagatttaccccttggtggtagtttactgacccttagtctggtgtgtttagtgtttaacaagcaaacaagttacatagaggaaacatagttacttttctgttttggagaaccgcaaggactttctcttagaccttctaacaaaaggacactatgaaaagcaaaagaagaactaaaacaaacatctaaacattctttattatgaatgatactttcttatactcaataataaaagcaatcaaccggtatttacattatttcaattttaaaaatatgaaatgtatccttaatcaaaagagtagattggtatagtttatgtaattaaataatatgataggaaagcagttagcaatgattcttcaccaacttgtgaaatgtaactttgttttttttttttcttttcatttcaggtattcaatacttcttagacacagacctgttaccatataccaaatattcctattacattgagaccaccaatgtgcatggttcaacaaggagtgtagctgtcacttacaagacaaaaccaggggtcccagagggaaacttgactttaagttatatcattcctattggctcagactctgtgacacttacctggacaacactctcaaatcaatctggtcccatagagaaatatattttgtcctgtgcccctttggctggtggtcagccatgtgtttcctacgaaggtcatgaaacctcagctaccatctggaatctggttccatttgccaagtacgatttttctgtacaggcgtgtactagcgggggctgtttacacagcttgcccattacagtgaccacagcccaggcccctccccaaagactaagtccacctaagatgcagaaaatcagttctacagaacttcatgtagaatggtctccaccagcggaactaaatggtaagaatccaaggctgagattcccctttttggtcaagacatgaatgagaatctattgtaattgtgcaattaggaatttggcagttgtattcctttttataactgcacaatataataattgagaaacagtttctaaagatataagatagtatttgtcctggttagtggaacaagtgtatttcttctaatctaataacaaattccattcaattaaattgccccttaaaaggctaatattatctttgctcttaatgacatctgccataacacaaatgatgtttataatttgaaactcacttatgaaatgcattatatttgactgtgtcacaagttagggcacccacaagcagtacatttttctcttctaagcaagaaaaagatataaaatgatacaaaaaatatgtatataagctaactgactccattaagttaatttttgcattcatgcatttgaacccttggttatataggccagacacacattcacagatttttaatcatttatatcatgtacatattatagcaaaatctttctttagatttgtaaagttatttggtaaaactgggtagagattgactataacatttatgcaaacagggcttatgttaaacaagttaaattaaaacctccaaatttgaaaggatacagactggagctataatgatcaaattccccaaaagaactggccattcttaacagaaattgtgaatatcaattctgaaaaagattgaatttacctatgataaagtgtagttattttttgtctatgtgttatccattttggtttgttttcctcatgagtatgcctttaatagtattttatacattcatctatatagcagtttgttgtcttctatgtacctgtcatctagattactaaactactaaatcactacattttgaatgctaaagaaattgacagtaatctaattagaaagacaatgaatatccagcactctttaactgacctgtccctaccctacccctaaagtaacccctttgtctgatgagttacgtaggttcactatttaatttctctaggaataattataagatatgaactatacatgagaagactgagatctactaaagaaaccacatctgaggaaagtcgagtttttcagagcagtggttggctcagtcctcattcatttgtagaatcggccaatgaaaatgcattaaaacctcctcaaacaatgacaaccatcactggcttggagccatacaccaagtatgagttcagagtcttagctgtgaatatggctggaagtgtgtcttctgcctgggtctcagaaagaacgggagaatcaggtaaagatcaatgttttaaattctacttttaaaacctctgaatgcaaatgtttcctcaaattaaagtcaaagtactgtgaaagtacattttgaaaagcaagaattagaaacttccatagaccaaggaaaattttcatatatatggatttgttacataaacaactcaaggtcataaagtacttgcagcaagttctagggggcaaaagtaaatgctttagttattaattcatggggcgaaaatggcttaactatagttatagtcttctgggaatgtttgtcaaaaatagcatttggtttccactcctgaagtggattggacacatgtctcatcttgctccatatacagcctaatttatgttcaatgaaagagataactgtcaccaattccacaaatttgtctttgtttttatttatctttccaaaataaatagtttagatactagattgtacataatgacagaatcgtggacatcaaaatctataattcacaagtgtgcttgtaagcagttggcatgatgataaggaaggaggacaacatatctaaattttctggattatcttcattaaggcaaaaatttttaatcctccactttattttttatattaaaacacttcaaatttcatgagcctttaagaaaaaaaatacacttttgttatgtgtttaatctgtagatatcaaagaaacccaaaccctgatctaaacttgacctgttaggaatatggaggatgagggtagctttaggttgatgtccaagggaatcatttcatgaataaaatacgcattgtgcttgagcatctcttaatgactaccagccatcttggacaaataatagagccatgatagcacaagtgatgaggcatggcattctggaaggggaaaatcaaggtcagaaatgaaaagtaatgggtgaaactgcaatactggtccctcgtaatcttatgggtcactagctaatgaaagtgcaatgagttcctttgataatacacctttggttagcacatttaaaatccctgtaaagagctcaggagtggcaggggggaaagggaaatgcatgtgtatgtaacctgaacatttcaagaaaaatttaacaaaaactttgagacattcattggggttatttagaatgctttaggtttacctctttctgaagaataatattcagccagctgcattggattggctcaatgacatatttccctacatgggaaatccagtacatcaccatgcatttttctgaactttttgaactgagatgttctatttttgtgacgttttttagatactcgtaagacttataatttcctatctatccactttcctatctttatgaacatgagcaaattcctatgagatttttattttgcaagtagaaagtagctggtaatatgaagatggagaatatactttcagataacattttaaaaagtgaataccttttacatataccagcatattcttggactttttcaaagcagaatattttaaaaggtaaaggtatttcagaaactaaatgaatgtgtgaattaaatttaaaaatatatagggacgacattcattgttttgatgttattgttattgttctcattgatagcacctgtattcatgatccctccttcagtctttcccctctcttcgtactctctcaatatctcctgggagaagccagcagataatgttacaagaggaaaagttgtggggtatgacatcaatatgctttctgaacaatcacctcaacagtctattcccatggcgttttcacaggtattgttatttttaactaatgtcctttcagaattggcttagggcttcatttggacattttttgagtttgcagaattctgtgacagaattctccctctatattgattaaacagggcattttttcttaatataatattatgtgtacaagcctccctctttgtatgtcacttgtatttttccagtataatcatatattgaaactaagttggtataatttatttcataagacttgttttttttccatttatcatgtatccttaaatattttacatgaagttgactttcattaactgtgtactatcatgttatttggacacacaataattatttaaccagtccacactcagttgatattgtattgtattaattcttttggaaatataaataacattgataaaacttcttatatgtacatttcatatacatttctacttcaaaaatctgaagaattgaatttatcacagcttataacaaaatgaattatgaatatgttcaaagttttgaatatacagtcatatattgccttctagtaattcatcccccagctagcagtagtgagaataattatcatagctaaaagttactgaggctttactgtgtacgtgaactaattcatctgatacatacagcaatcctagaggataggaggctcttgttctctccagtttacagttgtggctgatatacctctctgcccattttaccagcatccaggtggccaatagcagaagctgatggaaggatgtcaaccgaacaagttcttctgtgtatttggctgttcagtgcctcctctgagagagatgctcttctctgggcattagcataagataaaaagatctttacactttatacctactcccatagatctagccacatttttctttccatgaattcctagttcctgatccttccatctttttttttcatgcccttggccaatatttccaagccactgccatattgtccaggtacattttaccttgagacacgtctctttccacacaacatgggtgaccaggtgaactgcctgaagttctgcccactaagaggatttcttcgctctgctgtttcacagggtcatctctgacaagggttttagagcaacagctaccatttagacttgcagccacataccaagacatcctatctgtaaactaaattctgctttttttccacattctttcagctcttaagggacctcccatgggtcataggtatgagctgaggttgagccaccagtataagaatggtggatgtcatgggggcctgaaccacctgcttgcacaatgtattacggcttttggctctgcttatacccaatctcagacatccacttccattttatgatgaatttctgttgggcccttctaacctcaagacttggctgagacaattccaagattataaaaaagtagctctagctgcatggctatttggtgttccatgaccagatgttctgtttttactgaagcctgaaagcatgctagggccatttagcaaatggtatatagtttccattacatgttatgcctttgttccaagctcttggggtctatctgccctgtgattctctttctatgtgtgccttgcaacattttttcccacaatgcttacctctagtgctgtaaaaattactacatgttatgtcccaagtggctcatctgcctgtaccacaggctggacctggtgcagagccctttccgcctctgggatacactcaaaactggcagcattccatattactcagtaaatttctcagaacagtattctcaaatgtggaatatgctcccttcagaatgtgaagaggtcaactagacattttgtttccttcttagtggtggtagaagcaaggtgcaataatttgtcctttattttggaggggatatcctagcatgtctcaggccacttgaactcctaaaaacttcactgatatggtagattccttaatcttcataatattgctgtctcactttctagaacacatatgtcttacctctgcatacctaccatttcttgtttgtctgattcatttaatatgatgctatcgatataaagaatactgtcaaggtggcatttatagtttgtcttaaattggtgattaatcaccctcagatttcctttgtctttcttcagtgcattgatggcgaccagcaagatccatgcattgtccttataattactagtttccccagagtagtccttgtaattactaattccaccaaaccagtgaattaccttctactggtaactcatcgcagttcaccactaatggaagtttaagcattgcaccactagggcatgctgtggactgttagtactctacctgctgtctatgatgagatcattgtaaaccagcaagtggatgatggagctccaaaatatcattttagagtctccttcctagggccagtcctgttacgactatcttagggcaaattcccccggaagcagactcttggtagaggactgagtacaggaggtttattgggggaactctttcagaaacaacaaatgtgaagtgataaagtatgtaggattgagcagcaaagaagctgaactgtgatgcaatagtggaagcagcctcagcggattccgtgggtagttctggagctgaaatgaccctcttagcttatctcaaattaagctaggaagtcagacctttgtaccctagagtatttgtgtcctcgggctggtgtaacaaattaacataaactgagtgtcttaaaacaacggaaatttaggtgttagtacagccaggtcccccacaggctctaggagacaattcttctcttctacctacctgtggctcctggtgttccttggcttgtggcaacataactctaatatctgctgcctctgtcttcacaagtcctactctgtgtctctgtctcctctgggtctgtgtgtccgtctcatttctcccataaaaataccagtcattggattttaagctaacctgaaatccaggatgacaactaattaattacatctgcaaagaccttatttccaaacaaggtcttattctgaatttttgggagacactatacaatccactactaataggtttgccatttttttctaagcctttttaggagaccagaacccatgtacaacacacaattttattttctatactgatgaaaaagaagagccaataaataatttatgattacttatttttcattaatctgtctacgtgttcactcatttgcaattatctcatgatgaatacacaactggcataatatatatattttgacttaaacaggttagtctaccgatctggtataccatgggatttaaggtaaagttagttgtaactttcatgtggtctttgccatgttgtatctcatttatactcaatgttttattttgttgtttttactattctctggctttataaactattctttctttgtaaaacacagttttgatttatctattacttatattatagtagttgttgttctaagaaaaaaataaggtgagaaatattatttataaaatacagccttagaagtcaacctgtttgttcatattccacatctcccaattattagctgtatcacacgtctctctgcttctggttttattcatctgtgaaatgggaaaaccatttttgctcacctacctgcttaaagagcctgataaatattgacacattattattagtgattattattaatggtgtggaactacattatactttataaactagctatcatttaatggggcaggaaaataaatatttttattattgttgttgttatttaaaaggctgttccttatggctgaactggaataaggacatagatatatcaccttattctcttttttatttttatttctttgagacagagtctcgctctgtcacccaggcttgagtgcagtggcgcaatctcagttcactgcaatcttctcttcctgggttcaagcaattcttgtgcttcagccttccaagtagctgggactacaggtgtgtgccactacacctgactaattttttttttaatttttatttttagtagagacagggttttgccatctttgccaggttggtcttgaacccctagcctcaagtgatccacccgcctcggtctcccaaaatactgggattacaggcatgagccactgcactgggcctaccttattctcttttgaactctctctcctgtgcaaatattctctgttcaaggaaatgaaatcaaaagtagcagaacaaagtccaattttttaccttctcaatgattaaatttgtatctgaactgacctgagtatgtcttgttataatctttgtaaataaatagccaaaattcccagggaaaatctactataaaaataactagtaagaaacctttgcctaagaatgagacaggggggatacgtaaaagtggtgatgatgtaggattcattgtgggggatcaagctgctgtagaatttttcctacccctttgaagacttatttcatgaaaaactttcaattagatagattttataagacttataaattgactctatgtacatgataaagacaaagtctatccaagtgataattttatgctgcaagttctggggccaataatgtatttttaaaataatgtaatttataataatcatctgtaaagaaggaaaagccttttcaaaataaatattagtgtagatttcttctttcttattttatttcatcgtgggttcttgctacaaagaatattttgcttaaaaaatagttgtacttcctaaattaaataagaaatagcttcatgtactttatcctaaaaacaataccattttctaaaaatttacattgaaatctaccaggattattctaaaagggatgaatattacagcaatattcataagtttaactcagttcaaggtttattttacttagaaaattttaaatcacatttcacagaaaagtttgtatcttcattatatcaataatgattttaaaattagaaaaataaagaattacttggtatttgatgtttttcttatttcaaaatgtaattgcaaggaaatggttttaaagttttaaatttaaattattcctagagttttagaatctttaaaaacacctttatttctgaatgttattgaaacactgtattctacattccaatctcactgctttttagaacaactcatgtaacttacgaaattttaaagtcaacacctaggcaaatattccaaatgaattttattttacccctaaagagaaagtctctagaaaactactccaaatgttactgaactttacatttatctgtatttatatttatggaagattattttatatgactatgtatcagtagccctaagaaaattagttttgtactcatagttactgtcatactctctgttttaatgacttttattttctgaatataatttctagtggcctttgtacctacaacctaaacaaatttacatggttgcttttgatcacttcaaattataatgacagaaccaactctcaatgttaattgtttaataatttatttatggactgtgagtttcctgtcagtcttctttgctcaaatctgctattttcatttgaaattatatgataaagataatatttcaaataacgtaactgtttgatctaatctttatatgtttgtttatataagaaagatgattgagaattgacttaacgtggatgctcagtaatatgcttaatgtttaattttttcccctttttcttctgtgactttttttcataaagaaaatgatagtatcgatttaacatagcaacggcatttctttctgtcctagcaccatcaaatagcttgggtattactgctctgggttacttttggccaagccccatggctttgtttggactttatcatgataacaatgacaatgtcaccgtctttatctctaccattggtgacaataaccataccaccatgctgctttatgaggcaataacttggttttctcatttatccactcaggaactggattattacctcataaaacagtgtgattgtacaataatcaattaaatcctggcttgtcgagactcttcagaaaaaaaaaaaaaaacccttttcctaatggtggttggcaataattccctctgtctgaattcatggaactttgactgccaaggttatattttcacactgattacctattatctttctttctttctttctttcttttttgccttgaagctgttgcacactgctaaatcccaagaactatcttacactgtagaaggactgaaaccttataggatatatgagtttactattactctctgcaattcagttggttgtgtgaccagtgcttcgggagcaggacaaactttagcagcaggtaagcaagttttaatggatatgaaaaatctgttgcctatcaagaaaaaaaacttataatattcaacaccttctctacttgagactttatatttgtcttctcctccctcactaactctgattgcttcttacctcaacagttttaaacaacaacaaccaaaacgtaacttaaagaggtacctaggagctacgagttacagctgtgtcataataagaaatataattagtggtagagtgactccactctacaactagaaatatatagaatatacaactagaaacatatacaaatatatagaactagaaatacatagaaatgtaattagttgtagcgtgactccagggcttaactaccaacctgtgtcctagcagtgtcctgacaattgtgagaaacaatcaggaagcttcttatgaggacgttaggatacctcttccctcagtccagacattttttgtaggcttggctctactcactcctgatccatgggaacatctagaaattactgtgtggcctggtgttatatttggctttcatgaaataggtaaatgtttatctattgttttattaagaagaagcttttaagttaataaaatttaaataaaagaattgttattaagtataatctgagtagaaatggtttgtataatttgtgcttgcttcattcaggactaactggattcatacaaacctgattacatgtattagtaagacttataaaacccaattatttagcattaatatattttcaaatcagtgtttttctgattctagataaaagcttagtttcctggttatctttaaagaaatgtccatgtgtaaggaggttaagacactctagatgaattacagatattacgaaaattcatgtttacctgtaaaaacatttcctagacctcctccccaaatcccttcatcctattattaataggtccaattatgtagggttttttttctggttctggaaaaaattgcttagctcaaatgatctcatccaagtaatttatttttttcaaaattttcattaatgcaaacaactctgaaattctaagaaattatggtttactaaatttataactgaacactttgtatttttatgtattttatagatgtgcatttcagatgcatgaatacattgatggagtacctagcttgtacaaaacactcttctcctataaaactatctgtttttgtatactgtattattaaaggtttactgaatgctgaatatggacagcagaggaggactctatctcctttaaatgatacaatttcagactagaagacaaaaattaaaataagaatcagtcttacaagttggagaaagtaaaaatggagacaacggagggtgaagactgggtgtgttatagtaggggacatagggatcccaagcacgtggccatgcaaaactggaatcacatcctctcagggttgcaaaacatgtaaaaataatctagtgttactatatagccagtatcaatatattctttgtaatattcccccaagtgttcatctaacccatgtctgataccttcagtgttacagaaactactacgtctcagacaaagctataccatctttagatacctcttttagaatgtgatttcttagattggtcaaaaatatctcctagtaacttctactcaacattcttattctacttccttgggggctgtcgttaacctaatttatcatccttccaataacattttcaataacattatatccacccaagtcttttctcctttaggctgcatatcatggtggttcccatctgaacctcatatgcaatagtgtctagagctgttattagtataattcttgtagatgagatctagtctgccttttcatagatataagcaaactaaagaacctgaagagagacatgcccgtccctagaaactagctggatcatggagatgggaatagaagagcaggaaacatgtctacagaatagaatctgcctgccctatgcattagtggtaacatctgtgctaatagtatcctcattggttgcagtggcaaaatcctgttgcgtaaaagatgatgtacctgggtgctctgtgcagctctcattttagttactggtgaggcgattaaaacgactcctgtccactggcaggattgtgaagtaaaactaactagtcagagccctctgaatcctctctctattttttttatccttgaaaaatagaactggaaacttatattcgctaaaagtcatgtgacgtgaaagttagttgacttacaaaaataagagtttattcatatatgtgaggggaaaaaaatggttagccaaaatgccagggtttcaatccgggctctgccattgactagctgtgtgaccttatataaattatctaacctctgtgccttagttttccaatttataaataagcataacttatttgtagggttctgatgaggattagaattagttaatacatgtaaaatatttaaagcagtgcccatcacagttcattctcaataaaaatttattgtcatgatttttatcataatattatagaagacttttgttagtcacagtataaatgttatggaatttctaatgttatcaaaatcaaggagagtttattttacaactttgattttctaacattattataaaatataaaatggagagttctaaaactaaggattgtattgtgaaaataaaacttagaaaggcttaaaatctgaaagcattatttattatttctgtaagaagtatgtcattcagaattattatgcacatttcaaaactttgctcaaaaacagcaaatttcacatttgttggttgcaatatagagttaataatgtgccataaatgtattattactacattttattgtgaatgctcaattcagaaccatctcttgagggcttactatttaaagcactgtggaggattctaagataattatactcagcatttgggttaaggagttgagatccaacaggtaggattaacaccatggcgacatgtgctaagggctgtgagaaaggtgaaaaaaatgctatgggaaggtagaaaatgagataaatgattttgatttgggagactgagtagatacctcattaaatgctatttcagataaactataaaagaatggtaaagactttcgcagatatttactgagcacatacaatgtgctagtttctgttttaggggctggcactgttccaagtactgatgtaatgaaagcagagatttatgaagacttccctggtggtagagtacacaatagattagaagagggagtgtaataagtgtctggtagacttttttaaaaaggcaataagagagtaaatcagacgagtagaagtgaagattgaaagaagggaatggagtgacttcaaggaagacagacctggaagttaagcagtgggaaggatggacaatgatagcaaatattgcagcccatggtggtgccattaaataaaaggggaaagatgaacaaagaacagatgggagaaataaactcgtgagtttatttgatcatttgatagaaacacatccatgccaattataaccatccaggagcagaaattgcaaatctggggcttaaaaatgatgcagattttgtattcatctgcatatagatgggagctaatgctataggttataatcaattagtgaaagcagagaaaatgcaaaatggaagcccaaagaaaacaccttagtgaatattctatctgggaagaaagaagaaaggaagagtgaagtgaacagaggtatggtcagaattaggaaaagaactgagaggaagcagtatcagaaaagtcaagggaagagagaattctagaaggagaatattgtctgcagtgtcatatggtatagggaaagcaagagaaatgtgacctaaaatggatgcgaggtcactggtgactctctggggattaccctaattagcatggttgaagcagaagctggaacatgaaggattgagcagcggcaggaggagatatagtggtaaatttcaaatgtgtttttttttttttattctttgctaaaatttttcttctacccaattttcattcttcaaaaaattgtattaccttttgtttccatataaaatcctttcttttctaaagaaaaatttattttagtgtttgtttttttctggaaaaaatgtttattttctaattccttaatatattttgttagaactatctgattcttcacctgcccagcagaaaaagaaagtctcttatatgacaaaagtatggaaaaataatttttacttacagttgggtttattataaaatacatcatttttagggttgttcagatcagtgaaaataaacttatttgcttttatttgaataccaggaaaaaattataaatccatcattctttttgcctccttccttattcagtagatgaatgtgtatttctaaatgtttttccaaaacaaaacatctgaatagaaagtatagacattaaatcatagaaatacactgcagacctataataaagccagttctttagaatggtcaacaattttgctataggagagtaataaaagttgacttgcaactttactgttcatcctgctctgttttttctactattaacattgcaatttggagagtatatattattccaatgaactccaatggatttgtgggaaatttaactcttatgtctaatagctcatatgagctcattatcagacatcaatggaaacgagtgaccattcaaaaattttgaaaaagagcaccacaaattagaagtagtaattagccttttggaagcatttgaatcatgaaaagatatgttgcccccttaaatctcggtctcaaaaatcagaaagatacttgtgaagatttatcttgctgtttcattaaaaagcttgagaattataattggctctctcttgttttaaacattttttcaattaaatatatgattagaatgggtacatttcatccagagtattgcactgctgcttctttagtttcaatgcctgtgacaaagtctgagaactgatttgagagaggtgttctctcaggagcagctgcatctctctccattgcaaaatcttcaagcagtgttattaatggctttggagttgcttctgggtgtatgaaggtaatgagttgatgaactgggccctcttaaaatccttgttacacttttctttaagattctccttttaatccgagaaatttgtgcatttccacccattgcaaattgagtttagtttaaacccttcttatgagaaattacttttggagatccattcctgaagggacaatgtgatatttcccttgcctgtcataaattgacctccatactacaagcttagaagtgcccatctcgcataaaacaagtaattggtgtgcattaaattttctttctgaatgcaaagtaaaatgtataggctgtttgctgctgggttgaaaacacacattgttttgcattcgggtacataagtcttttccttgtgaataggagccagagtgattaaacaagcactcttaatatgttaatttataattttaattacaacaatcttgtatatatagtcattagtgaatactaatataaatatttttctacctttttattcataatgcataaaccaatcacccagttacttctctgaggttgcctgtttttgtttcataatacaatctttgttcttagttatgaatgcattttgttcattcctgtcttcaataatccctcattaagctagtcactttctgctccatgctaaaaaggaaaaattatcatgcaaatgtggcatgccatattaaaaagcacattaccaaacacttttgttgctgtccttcaattagtttcccttctttgaatttaattccatttgttgttaaactactgacttgatgtatggactcatgaatctgaggctgctgccaagaaagtggggaaaaaaaatcaaagcctcttcgaagagctgcagaggcgagctgaaatgaatttgcttcacctttgacaagaacacttgaacagcattggaatcctctgatgattcaacttggctaattatccaattatttatttcaagaataaaggcaccattttacaattaaggaagtgtaaagtagtctgagaaatttggtaatgacagatgacttaagtaacttctaagataaacagtatctgtgcaaaacttgtcccaccaattgttttcaggcagcagttggtgtgtcttagcatcagtgaaatcctgagtacactgaaggttttttgtttgtttgttttgctctttcaacagaaattattttacacttgtaaccaacatgtcaaatttccatggctcttaagcaatgtttaagttatatttctcttgattaaaagctttcggttcaaagcaatactttttaattgcctaatgatataagtcagttcttaggaaagaaccgcacatttaggagttcatttgcaatataactgaaaaattcattgcatggcagtaaaacaatttactgttaattacaaggagaagaatttgctgtagcatgctcgcagattgccatgaatcatgcagcactcctagagatttataacagatgtgtaaatgggatgaattagcagggtttaataacagagacacaaatcatgcagacttcaaggagctttaattgatatactagaatgtgacgggcatgaatcactcagccattcaacagcactgtaacatatggtcagctcaatatgccgcatcttaaatcggttggtgagtcgtaggttgtcccatatggtggaagcaatacatttttcatgattaaaaaaaagaatccattttttaaagaaatatgattgcaaagcatgttattgaacagtcttctgaatgccaaactgctttttttaaatgcttttttttttctttaacatggcagcttctcaaaataaataggggctactccttgtaataccagatcgctggaggcattataagaaccaaatcggtgcttgttggcacactcgatccacagcaagcctatagaaaagcgcagctgatgattgctgtgattgtcagggaaatccttcaggctggggcaaaacaaacaaatgaaaggatgatgtcactttcagagaagttcaggaatgcccagctttgtaaattgaagaaaatgagttggatgagagatccctgcttagcagggtaagaaagtggctgtgataaataataccatgacccctaaggtaacaattggatgtaacattttatactaacttcttaattaaatgctcagtcctacaggggcatgtgaaaagaagcactggctggtcatcacatagatggtagcaccaattccaagtcattcttgaagaattatttcagtatctgcaaacaggtaccctggttgaagactggtaactggtagtgtgcaaacatgtttttattggaactgggatctggcagcttttggaaaagcttttgctgcattagtaaatctgacagacttgaaaaaggaatattgcagccttagaactgtggctgccagaatttaatgtcaacaattaaaatttattttgatccttacctagtgtttattactgtttgtatacacaacagaccttactaatacagagatgcactattagatggaattaccatctgttcagagtgaaatgctggcatctgtcttagatgctaaaactaaaatgatattatttctaacaaaacaaaattaactgctttttactcaccaactttaatttgtagtgtgtagttgtatccaaggaaaaggcttgattttgaactatgtgatgacctctgtggccaggtctatatttagatatgcgactttatcaggggctctactggcctttttggcatatgaaaatggcatgtagaaatcacactttcaatacacaattatagcttcataatatactatgtatcctataagtcattaaaacaacacaaccaagctatgtaaaaattgactgaatcagagagactctactatgcaaaatattttgacagatacgccctaaaaaactgcaaggaaagaaattaaataggcaaaaaatcatctgaacaaagttgctataggtcccacagtgacatctttaggaaaatacaaactgtatctttcttctctgttagactattttaaattttctcccacatggacatatataaaaaatttacattcagtgccccctccttttaatttaaagcctaagtatcctattaaaataggtctttagcttttggaagttagagaatttggaggatcaaggacaatggtagtttccatactgatgttagatcagtgacgctactttctgagaagccagacttctattctatatatcacaaaataataaattgtgtcacaccagcatttaatgcatgtacacagtgcattaactgtaactgtagtacatttatttgtgctgcaggagacttgaaaatgatgaagaaatcgatactttgctgtcagagaagcaagtgttacgatgcatttaagtagttaattgcataagccccataaaagcttcaagtttgggtagcaaggatgccataattacagtctgagcaactaccttttattagtggtggactttagggaatggtggttgctgtcatcattgctgctatatgtgcagtttagaaataatggatcctcttctctcttcatgtgtaggatggtagttttgtgcaaattattgtgatcgccagaacaataactggttaaggtagtgtttgttcaccatgttcactgaacttctctaaaagcagggttttctttatgtcacagaacacatagacaaatcatatttgtatgccatgctaaggtaaaggaacaaggtggctgagagctgaaggggataaaccagaggggctcctgctggcttcccaggagcaaaggggatcaggatgtctggtacccattcgtggcttatgaacttagaagtactgttttaaattattcaaccaaagaattttgaaactggaagaggtcctagacataatcaagcctgtcactctaacaattgaagtaaccgaagaatagagagacctaataatggattaaccaatgttccataatcagggtcttaaagagccaatctagagcctacattttctcctttccagatcttctagtaatatcctctcctgaaggtgacttgtcaacaaagaagaaagtggcaaaatatattttattctttcttccctggtcagataatagacagtcaacaagatgatgctgagtcacccctgagagtttcgggggaaaacttttcctctttaagacactgattggtgagcagctgattctgcagcagtctctctgcaacagagaaatcagggctcatgacctggacttcttgtttgcgtcctggtccagtgcccttttgcaagtgttctggcctagcagtgtttggcaaattgtatttcctggcatagttttgcatttctgcgaaaaagtcaaaatcatattctattgacagggtgcttattaagaatgtcttatgtagtctgctccccacccacccctgaaacatagaaaaattgtttattcttaaattcttgtcatcatcatagaaagctgatgatgctttaagatattgacacagccatacagtcttcataggcaaaaaatgaacagattccttaaaaacaaatgaacagattccattttaaagaccagtacctcagaagagctttgttcagcttttagttcttatcctatggtgctcaaaatgctacactacataaattttgcaagtctaaatgtattcatttggatatactactaattatgttataaagtaataaatgctgcataaagaatgcatattataacattttataaaaatatctatacatcgaatagatagacaagaaattagattacccctattaaaaaatacaagtgctattttaaaagtacaagaattttgtacttttattcaaatagacattttattcttagaaatgatggataatgaacattcattttaaactttgtatattatccttagaaataatgaatattgaagattcgttttaaactttacatttacaagaattttctgggtaaatacagatagattttgaatatagatgaattgtattccttaatcatacataatttgaaagatttgttcttgtaatgatagcaccttatatttgtatagaaacttgttttctaaaacataaagcaaatatgtatattgttgtagaagcaattgttgtcaatgtatgtcactgaaaatgtatcctcatgttgcagatgggaaagtgggagcagatataaagggatttttctaagatcacacagatttagacattaaaaagtgaaatataatttttaaaagtctaccaaatccctttcattattcagtgttgtctcttaacgaactgttttgtaaattaacaaatctttaaaagtcatatctacttttacctatagttccttttccttgaaaatctgacgaataattcatcattaccccaatctcttggtgattctatgtgcatgtatgtgtgtgtgtttaatggttcagaagtatctatttttcttcttattctacttgtgtgtatgtgagaccagtctagtttaattgattgacaatttcacttaattcccccttccagccttagaagaactctgaaaagaataactcagtaggatgttcaccctttcaaacaggcttagttgactcctccatgtgaaactgtaaaacacacctactggaatgttttttgttttgtttttcttttaagcaagagaataaaaaatgtactctagttctattcattctcaggaattgacttctaaaggacagtcccattgctagatggaataattcctctgggaatcaagaagtgctctactacttaaagtttaaatggtaaacattaactttaatggactctcaagaatttccctattgattagaatcactttgccaaattaaaaaaaaagtgtgctctaattttcaataattattacacaaaaacgacagagttgccagaattccttttgtttagttttgtttcctattactcttaatctatattcctgtttaagacgtaatttttggattatgctactgatgggggaaggaatttgatttctgtggtggtgctgagcttcaacattatctccattgagttgagtggttggagtaaagtagagatgtatcaactttcaaacaaatgggacctggagaaaggctgctttcaaacagcaatgaaattcttcagcttttaagaagcataggaggcatattcatacttcttctcaacatttagttaaaatggaaatcctatcctcaacacaccaaatatgtataatttgtgatgctctgtctacatctttggtgtccagtatggtagtcatgaatcatatgtggctatttaaattcaaaatacagttaattaaaattaagaaatttgacattcagtttctcattctcactagctacatttcaagtgctcaatagtcttattataaggctagtggttaccgtattaaacattacagtcctagaacatttccttcattggagaaagttctattggacagtactggtaaagtagtttttggctattggatattactaggttagtagtttatgaaactaaaaagttcaggtttctgtgtcccaaaaccctagggaatctagcaaatttcaatttaaacattatgtaattggttctccattgcttccctgagcccaggactaaaaaatctttggcagctttcctttcctagttgagattatagccaagaatggcctgctaaaatcttaatacaaatatgtaactctaaactctgaagagagactctgggtgaagaaatttctgaatggcttagccttttattttgttttggattattttgaagtgagatcataacttgtagaatgaaatctttgagaacctaccatttaactgatttttagcagaaaaaaatgctaagagaaattatgcatataattcacagattcatacatatataaaaataaaatatcacatgggctgcagtggcagaaaataaccagaattgttaattatccttctaacttgatgaactttttgctcagtgccttttcttttttactaaaagttaaaatagaaccaaaatgaattgtttctttttgaaaagctggccgaaggtctaaaaagtaacaaatactaattgttctaagctgctttacggtgaatttcctttcatggtttaagggcttcaattcttatatccacatcattttgatttatatttattgaaacaggcaatgactttgcgtctgtgtatggctgtgttaacacaggtgtaaattgaaagtccacagatgtagtttgggcccttaataaataggctcggtgattatgacatttgttcctttctccacattcacctctcaaatccagcagacatacttaaagggggaataaatctcagctcacaaactcaactgtttaagggaaaaaaaaatcaaaccaaaacaaaccttcattttcaataaatcagctgttaatctgaatgagcaagttgtagggaaaaccttaatctccgtgactcctagggtttcccaggaaccttcaaagaattgccagtgtcccaccacctgaaaggatggcaaggtcccagtgtatgcaagggcatgaggtcactactgctccaaggctaagcccactgctggtggtggggtcacttcagggccagggtgctctctaggaccaagaggctgaccaaagttagttgcctggaccgttgtgtgtaaactgctgaactcacaggcttgttattttgtgctgatgctctgtttaacattcagagtgctattgcttgtttgctttcatttagatcagtttttaagctttaaaaatagaaaatagcgtataaaaggagcttttttgaccaaagaagatatacagatggcaaatacacatatgaaaaatgttctatatcatatgtcataaagggaaatgcaaattaaaataagataccactacacacccattagaatggccaaaatctggaacactgacaacaccaaatgctgatgaggctgtacagtagaaggaatgctcattcattgccagtgggaatgcaaaatggtacagccactttggaagacagtttggcagtgtcttgaaaaccaaacatgctcttaccatatgatacagcaattgcacttcttggtatttactcaacggagttaaaaacacaaaaccctgatatataattagatgtacacatatatatgcacatcatagcagctttattcacaattgccaaaacttggaaacaaccaggatatttcatcagtagatgaatgaataaataaactgtgataaactatgctacatccagacaagggaatattatttagcattaaatgagctagcaaatgatgaaaagacatgaaggaaacttaaatgcatattactcagtgaaaggtcagtctacaaaggctacatgctttatgattccaactatatgactttctggaaaaggcaaaactacggagatgagtagttacctggggttggggggaaggagagatgaataggcagggcacagaggatgttttgggtagggaaaattttctgtgtaatagcataatgatggatgcatgccatcatacatttgtccaaacccagagaaggtaaacaccacgtgtgagccccaatggaaactatgtactttgaatgaaaatgatgtgtcaatgcagatttatctactgtagcaaatgaaccatttgggtgccggatgttgatattggaagagactgtgcatgggtggggagatatggtagaactctgtaccttcttctcaatttttctatgaacataaaacttctcttaaaaattaagtctactgggcgtagtggcacctgtctgtagtcccagctacttgggaggctgagacaggaagattgcttgagcccaggagttccaggctgtagtgagctatcattatgcctgtgcatagccactgcactccagcctgggcaacaatgtgagactccatctctaaaaaaaaaaataaataaaggttacccctggcacattgcctatggtgtagccgtgctccacaggagcaatcaaaaacaaaaataatgaaagtctttttaaaaatgactttctgatgtatttttacacaagcacaaagttttggcaaactcgtgttaatattccttcattacccattggttggcacggattatgctttgcctgtgtaaattacagcacggagttgatgcctctttaaggcaaggggctctgccctatgggtttagtgctagtcattggctgtaggtttcactgcgggatcctgtggctcctgggtgaggcagctcttactcagccaagggaagttctacgcagaagggggcagccatgagccatcagaaaccaacgggcacagaaactgggccattggggtacctgcttggtagagggactgtggttggggcaccacccagagtacagcagctactataatatataagatctattatttagctaaaaagaatagagaagttattttcaagaaaaaatttaatttgaaagttttgtgtgtagtatattggccatttaaattttgtttcactgcatttaagataaactctatattgtgttttcagttcctagagccatacagatacttgaaaccacaactgatttgatttgaagtgtgatatatacaaatacatatatacgtatatgtgaatatgtgtgtctagagacagaaaccaaattcttgaatataacaggtgttttctaatatttagcaccagcacaactgaggccacctctggttaaaggaatcaacagcacaacaatccatcttaggtggtttccacctgaagaactgaatggaccctctcctatatatcagctggaaaggagagagtcatctctaccagctctgatgaccacgatgatgaaaggaatccgtttcataggaaatgggtattgtaaatttcccagctccactcacccagtcaatacagacttcactggtaagtgtgtttgacattgctttatttaggagacacgaagctccaaaatgttttctatattttcatatccctttacaatgaatttttattatacctacttagagaaatactaattcagccctttgatagcttttgcctgattgtttcagcatgtccatctttttagaattctggggaaaaaagtcaggtaagtgaaggaaaggaaaaataaaagatgaagatgaagaagcagccttattggatcaaagtatgtgctttgtatttgtctttttgtgaagtatgtgccaggacatgtttcttgaaatattattcactgtgttctctgagcaaatgagtttgcaaaatgccctcatgctattggagattctcagtatgcaccccgttactgaaactccaaaaagcattgtaagaaagctattcaactttgcttagctaatcatgcctaacagatatttgatgtaatgttttctttttctttctcttgctgtttccttcttctttttttcactgtgacaacttaatatctcatgttctatgaagaacattgtggggaaaactaatcccagggaaaagataacttctctaagccaggactatggtaaagcaagtgaggctcttgtttcggtcacaaaatttaaaggcactaaaaaactcagtgttaatgtaaattttaatgcaatatttttaaaaatgaaaatcaatgtgaaagcactataaaaatattatcaaaagcttaaataaagacagattgaactctgtaccagcacaatcctgcctcactggccttaccctcctcctggccttactagtaccgcaatattttggaagtcccatgacctctgtgacttacagcttctaatagcatgatttcaatatagctgtaaaaaaactctacttatggtacaccatttttccaatttttaaaaaaatttacaaagtataagatatatattattatgtaaactcataaagatgttcatttaatcatccatgagaaagtcattttggagcaaatagctagtctttaaaatattgcatatgtgaagacaatgaaatggaattcgagctataaaaatttgtattgttttatttttacttaaaatagtaaatagtttgcttttcattgagactggctgctgatgcaccttggtaatgaatcatgattatattctaactgagatatattgagattaatgcatgattaactactctctcagtacatcaaaatcattgcagagtattagaaattgaaccattgagctaaaaatgctcaacttctgctttatattcttaaaatggcaaaaaagaaaagaaaaaaaaggtaaggaaaaggaatacatgaataatagtaaaactcttttctcaaatgaaaatggaaactacctccctgatccaatatttggcttgagatgtgtttcttccaagaaatagcatccgtttccattcagctgggcatagctgctgcaaggatgtcagcttggatttgcaggctagccagcagacagatttttgatgggatcacctactgttgttgcagtgaaagatagaatggcccgtccaccgttaataaatttggtcatcctcgctatctcccttgctggccttatactctgaggtgcaagggctaggggcagatgcagtgtctgggaagttttccaaattcctctttaaaaaagttaggctgtaaacactggcctcactaagcaggatccttctgtctataacaaagcctccagctgcacagaaaatatgcttggagtacacaccatttgaaggacaaggcagggagatcacaattttggcttgaactactccctggagctttggtgattcctggagaatgagaagttcttctgtgttcaggcatgttctgggacattgctgatgccctttttagtggtagcttggctttacttttaagacccctttaacttttaatataaccatgtatatactaagttattggtttgatcctttggctgacttgccaggtttggctgaatgattttattgagttgtaccgaagcctaactaaatgtacccaattaatgagctaggacaggttttcaaaaccaactcaataactttctgtaaacttgcatctttcctaaatagagaggtaagcatataattagcatcttacattattcttactgatatattatcctatttaatccctctgcaaccctataaagtagctctttttaccctcgtagtacaggaggaaaagaggctccagtgagtgacttgcccattgtgccacagctattgaatttcagggtggaaacgtgaattggagccttccaaatttaaaggcaaggtctctgctacagggtggaaaggaacttttgtagactgttctttggaagtgatagaataggaagtatacaaaagtaagaaagagggataggaggtgaaataattatcacccaaatattccttatctgacactgctaaactttttggatttgtctttcagttagtttcagctcacaaacagcaagtagtgttggcattatttattcatttatttgtatccccaaagacatgtaggcatcaggtttttttttaatagcaattaaacccagagtgttactagaagctagatgtttaaaatataaataacattatgtgaaatgggctgaagtgttatgcgttaaaacagtgctttcaactcacattcctttatatttcattcagtttttatattctgaggcaaatttaatgagcaaatccttgaaacctctaatatgatgaattacattttaaaagttaataactttaagataaactaagatgtcctttgttttgaattattcaattcaaaatctcaaacttcaactaaaatgacttctgaatagaaatatcaattagtactcaaatacaaatataaggttgatgtacataattatacatattttatatatgaaaagataagttagattgtacccatcaatgacaggaattataaacgcattcataacacatttcatggccatgaacattatgttgcaagtctcagtaagaaatatctcattattgtagtacaagaaagggatctcttacacaacttatgcctctttcatatttgctttaaatatttttatcttacacaatagaaagagaataattcaagcatatgaatatatgtcctaaaatgttgtttaatattgtaaattaccaagcttaatactgtaaataaaccctgtcaatatctacctttgggcagaataaagaaccagataaagctattttgggacctatttttgcttccttttcttttctgatacaagtgttcttttaaaaaatctaatcttcaggaagaatgtattatcagtcatttacatcatagtttaaatttaaaataattaactctctgtatattattatgaggacttcgaagaagattaactgataaattactttcaaatccaggccccattatttattagctaaatgtaattagacaactcatttaatcattttttgtgcttctgtttccttttctttaaaattaacataattccactgacagtattggtatctagcaggtaggtgaggatttaaagtagatagcccacctaatgaactttgcacagtgcctaccacacagattatttagtactcattaaacattagctattagttattattcatttaataaatatttattaagtgcctactatgagacaggagctttcctaagtgagagtattctgcagttataaaatcagcattctattaatttatttgctgttacacatgcaaaatatgtttgctcaaatgttatatctagggcatgagtaatatgcaatattccatattaaaatgtgatacttaattttgctattgaaaatagtaaaattaattgacttagtggtgaggacttgggcaaactacttttctgagtgtctaatcttgctcatctattaaattgaggattttgttgcatgatcaatgttctaacctctaaaattccaattctgtgaacatagaatgtttaggaggccccacaatccaaaatacaggctgtaatcatggcatctgtgagttaaaaaaacacctagagtttaaaataaattgttttctataatattttgtttattaatacaatttaagattgatacaaatttactgcttttctctaataatttaagaaatttagtgatatgggcagagttcaacataaaatagatattcaattattgggtcatatcagatgttataaaaaaagcagaaaattaaaatagtttcgtgatcttgtaattgggcaatgatataaacaatcatggtgaaacagtgccccagttacatggggttaaaaatactttcttcttccaacacagaaatagcaaatagagcctcccctcccatatgcaactagaaggggatatcattgtgcctttggagagaaaaaaaaatcatgctcgtttttttcaggaatgcagagtaaatctacttgatttatacaaagaatttagttctttccttgtaatgctagtaatccaagtggaacctggtaaaaacagcaagtaaaatactgctcagattggcattccaaaggtgaccctctttctccttgtcacttattttttcctattagcgaaaacaggtccatgatcatttgggggaaggtttgactattgtagtatccagatgccaatcacaccagccttttaaactgcctttactggtgaccctgcccagaaatcaggaactgcctttggggagatctttgtagcaaaccactggggagatgagcacacacatgcacctggatataattcccttttatttgtcttcacgagaaatgtgattactgatgttgaatatcttgcagatgagaactctatacagtttcttcataataatgatgttcaaggacactaaatgattgtcatacatttttgtatcatagtattcaccttcccaaaaatggttgaactaaaatgctttagaatacgaaatgcaattaattaccaagggatgaaaaaagaaatgcaaccaccaaaaatcaatatgtttaagagcatattctttatttcttttactccataatatttatgccttattgttattagtcttcttatttttagtgaattgggacatttaagcacttcattaaaagaaagctgattataagcatttatagtgaaggtgcaagtagggcaaacttcttcagatagactaattagtaaaagcatattaattctgaccttcaacacccttggtgtcccactatttgttttccttggagtgggagcaagtattttgacagaaagcgcttgaaaaaaataaaaaacaaaacaactaaacaaaaccccagttcttttcaagacagatttaaatcacaaattttacctaacctttgatgttagatttcagccctagttattgaaaaacaaatataataatctactatgtgtcctagaagtttaatgaacaggcagtaattatactaaaaaagtaaaggaaagagtaagaacatggtatgtggcagcaaagtaaaggagaaataattctcaggcagtgacaaaactctgctgtgttttctgattatgaaacaatcagaagagatgagaatggttgagttaatcagtttggactgaggacaaggatcaaaatgcatatcttcttagaataacagaagtcacactgactcatgataactagagatatggagatgtaaatgtcaagactgtttattttttattatatttagtagagaggtataagtaagttctcaggaaatgccttcaggtggcattgatggcactgcgagatgggagaggaccattatttccccattcatcaactacatcataagaccaatttaagaatgcatgtgttttaacccttgccttttaaaagtgacttattttgaagtacattcctgtaagtctcccttttttttgaaatattaatgttaggtaactggtaagctgagccaacactgaaaacaaactgtttttgttagctgttagcagtattttagttaacttaaagcatctgtttttgtccatcactgttaaaatttttcaaaatgcattgtcacctgatatataaaccacacgtgtgttcctatatactcatcccacatgcataaacatatgttttccagaaggtctctgggttttccgcaaccactcaatgggttctccttgcccactgcctagacagagccagtttatcaagacaggggaattgcaatagagaaagagtttaattcacatagagcctgctgtatgggaaacttgagttttattattactgaaatcagtctcttggagagtttggggatcagagtttttaagagtaatttggctggtaaggggttgggaagtgggagtgctgattggttgggtcggacatgaaatcctagggagtcaaagctgtcctcttgtggtgagtcagttcctgggtgaggaccacaagatcagatgagccagtttatcaatctgggtggtgatagctatttcatgagttaagggactgcaaaatatctcaaacactgatcttaaattttccaacagtgatgttatccccaggagcaatttggggaggttcggaatcttgcagctggaggctgcacggcttctaaaccatcattccttatcttgtagcaaatttgttagtcatacaaaggcagacaggtccccaggcaagaagggggtctatttagggaaaaggctgttaccatctttgtttcaaaactaaattgtaaactaaattttttcccaaggttaggtcaacctttgcccagcagtgaacaaggacatattagagtttataagtaagatagagttatttaggccaggtctctttcactgtcataattttcttagttataatttttgcaaagtcattttcatttctatatagtctcaaatatacctgctcaaattgtccagtgtcttttctgccagtatgttggcattttggaatcttttcaaagacttcattgcttaaaaaaaatgctgttgcttaatgatattttgtatcaatataacacattaattttaatttccccttcattcagcttaaatgggttggaaaaggaactttgagcagaaaaagaatcataattggtcagcaatggtagtgaaactagcacctttgaagatgattgatttttgatttagtaagatgaattattttgtgtatgttttcttgaaaaaaattagttaaaacatttaaaaatgtatagttatagttattttataccagttacagcactcttgaagtgtatagattaagttcctttctattcagatagagaggaatctgggaacatcattgtcaaaatgccatctctttcaaaacttggttccagtgctctaaagaaatgttttagaagattatgcactaatgttactggcggcaaattcatatagatctgtagccacctcaatttttgcattctcagaagaaagaatttgattgaggggacataaggcatattaagagaccaagacaaattttagagcaagagtgaaaatttatttaaaaattttagagcaggaatgaaaggaaataaagtatacttggaagagggccaagtgggtgacttgagagatgatttgacctttacttggggttttatataatggcatgcttccgaggtcttgcgtcccttctcccctgattcttcccttggggtgggctgtccacgtgtacagtagtctgccagcaattgggagaagttgaatgtccagtgtgtttactgaagttataggcatgctcacttaaggcatgtttccttgccagttaagtgttcccagaaggtcatataccggttaagcgccaacattttgcctcttagtgcgcatgcttgagcccactcacccatctcctgagatctcattgggaagctgctgatcacccgtctcaggtgtttctatctatagggagactgcctttccctggcactggctgtgactgattcttattattttagagagatagtgtaacaattatcacctgacggttgcctgacatttctggtggggcgttgtggggggcggtgcttctctgaccctgcccatagtctaactgccaactgtaacactaacagtttcattgaagtgggggaaatgttaagtaataatatgaaaaccatatttaaggtatatatatataaggaggctcacaaacatagccataggccgtttgtttggagctttgaaaagggaggctcagttccttgactgatgagcagtttccatttggaaattctttgactttagtgcaacttcaaaataaaggcatgagacagaaggagagaggaagaaaccctcaagccatctaaagtcatctctggcaatggtggccatatcattttcacaaaaaaggggcatccttggggaatatcataaaggaagaataaggacttaagggaaatgtgtgggaatgattgactgatcctccctccagcagaaaattaaaaatcaatgtagatgcatttttctcagcttcttcccttcatttttttcctctcctgaaacctgttcctccttccgtgtgtaccatctacagtgaatatcactattgccttaggcggaaaccttggaactctccttgaattggcacttgaactattcactcatttcctcccattctattaatgattcctcctctggccgttcttcctcggatacatctcttggaactacctgctggtcctacgctactgcctagtccagacctatgttgtgggcttctctgccaacagtttcaatcttctccaggctgttcttcaaacgaattatttttattggcattctcttgtgtaaaaccttttaatggtttcccagcgagagatgcccttcacaaacccttttctgcttacctgctttctacctatatacctcctcatctctcccaccaaggactggtatactctctagctctagaccattttttagtcccagtgcttgaatatagcacactctctcagatgcccatctctttgaacatattgatacctttgccgggtatgccctcatctatttgcaagtacttcgctttcctttcacctggctaattgctactcatcatgaaagggttagcttagctgttcccctaaataaacttccagcaaccccagcctcctcccatgccaaatctgggttgaggacctctcttatgtactactatagaaaccaacaattactctattttagctcttaccgcattctattaagacaggttgttcagggagctaagctatgaggacgcaaaggcataacgatgatacaatggactttggggactcaggggaaagtgtgggatggggtgagggataaaaaaaactacacattgggtacagtgtacactgttcaggtgatgtgtgtaccaaaatctcagaaatcaacactaaagaacgtattcatataaccaaatactgcctgttcccaaaaacacctgttgaaaaaaaaaaaaaactggttgtttgcttatctatgtttcatgtagactgaaattatgactatctttttcatgcttaacacatttgtgtcttgcacggcataagacatttaccagatactcaataaatatttattaactaaatgagtgatagaaaagagggaaatccaaaagatggatcacttagctgtaagaattatttaatggcaaaattcattatgcttttgaatatagttcacatttttaaatccacgtttttgaaagtattgatggtttagagtgataactcaatttgtttagtctctattggccttagatgtgtaagaaaatacattttaaactgtatagtaccagagacaaaaagaaatttcttgttaatggtcctcagttgctggcaaagttacttgtacaccagttgttatagctagagtgttatatcagaaattgttttctgccccaccatagctatcacattgtgttgctgaaaactaggtggttgcacatctcttagatacatgatctccttaggcttattaaattttgaggttaatgaatattttgacacttttacctatacatatcattagggcttattgcaataggtttaagatgacagtcataataaacatatacagtacaataaaaagcacttttaatcttgaaagtgctttaaaaacaacagtgatcaatgctatggatggattaacagcatcatgctgattgaattctatttcaaggacaatggaggtattgatgttggcagtctagttcagaaagtggcaatggctgtagtaaatggtgcaggttctggagtcagactccccaggtttcaaatctggctccccaacatgctggtgtgcgactttgcacaagtcattcccccagtgtgaaactcagtttcttcatctgttaaatggcttattgtaaggtttcaatgcaatcactgtaaaggattagtacacagtgtcttagtattgtgtatgcatttgtgaccagcattctgtaattctggacttcaattatgtgcctttccattgcatacatatattttatgtccctaagtcacataaatcttgttgatacttctttatgacctctctctactacacggtactctgatcattcactttattttactcattctgtgaacctctgacctgttttttgttgtcattgttacctttcttcttccactagaagcatacatgttctgcatctcatttctccacatctatttaaacagccaactttaaatgttatgtgtacttataaacctaactctattattccccctgtcttcataatcagtcttctcgaaaactaagactctctatgtgtcattttctcatggatcaattactcctcaatctactgtcatttggattcttttcttccacttctttattgtaaatactttcttctagattatcaatagttttcaagtcagagaactttccttaatcctcaccctatgtgccaataaataatattggtgccattttttccttttaaaaaataagaagaaactaaatatttctcactaggtttctccttctattttccctaaactgtgtttcaagctttgatattgctttctacatccacctttaaatggaagagttcaatcactcattcggttcgtatgcagtttttccttatttcactccactagctgatgttatgattgctgtcgtaaaaaggatactgagcaacacaagaatgattcctaaccttagggagcttaaagtcttgcagtgaaatcatgcatcaaacatgtaattaagtaattacaagtgacttctgtctccagctatgaagcatatcaaaaaatcctcctgctgagaaaagaaatagaagctggaaaaaatttctcaaaaatatggttaaagacataagtgagtaacaaaggcttctaggacttgtgggatcaagatcctagatataagaaaaaccatgtaggtgagccttttaaattatctttgtttttccttctgttttgtttgttaattcctctattgcatagtcttagggaaaaaaaaaagacaggcaaaaaattagagtctaggtggggtcctggtatacatgccaggttttcaattgaaatcctagaagagcaaatcattaataggctcttcttcctcagataaagcctcaattattcttaactactaattatactgagataaaagttatttttttaccaaaaatatttagatatttgctgaaagatcacatcaaccagagtcccagagtgtgcaattttttcctatacaatgtcgggcattcaatcaaatattaacaggcataccagaaaatagggccaaataaccaaaagataagataaataaaataaaaaatagaaacatatcctcaagtaattcagatatatggaaatatgtatttgcatacacacataggcatatacacacatatacatgtagatatatatgcatatatccagacacagactttaaaataactataattaatattatcaataaaatcaatgaaaatgttcagaatttaagtagcaaatgggaatatattagaataggaattttagagcggagtaacagctgaagttagcaactcagtagataaaataccaattccatccctgataaagtaaatagccttgttcttaatatcgtatgcaacaatgtaagttgggaacaaaatatatatgaaacacctatttgtagccaatatatagcaacagtgcagagctattatgcttaagtgaagaaaagcaaatgaactgagttgcacacacctggaattattgagctcaagcagagacattagtatatctggtaaaggaataaaaactggaattcagggctacaaaagtagatttggagggtaggttcccagagagaagattgatgctgaaaaataattcaaaaattctgtgtaacaattcttttttgggtgcttggccaacatttagaataatcctatgagaaacatagtagagaagatctgcttggtagttggagctaagtagagatttcacaggcaacatagagctaaggatgcacacatggagtttggacttaaccacagtagagaaaccttggtgaatactctgagctttcactcgactctccaaaagtccgtcctttatgagtaaattcccatgctttaggaataagggctattctttaggaacattgagataattgaaacagattcaccctagtgaagcctaaagccaaggctgagtaaggtcgaggtaatctggtaattttacttcccgtcaaaacagaattttgtattcattagtaaaaggtaaaataatccagaggttttactatgcgtcatccatgaagtgaccaataatgaaatgttaatagtcgatagaggcagacaaagacttcaaaataacttcagttaatgttaagagaaaataaaggacaaggtggacagaaaggatgataagataaaaaatatttcaatgcaaaattgaaatctgtacagtaattaataggaaaaaatggtatgtaaagtaaaatacctgaaatgaagagaatattgataagttttgccaatgaaacattgcagaaggcaagattagagaactcaacggtcaattgtaattgtccaaactgaagcatatcgagaaggaaatgaaaacatgaaaaaaagaacaatgaggtatttgaggacccagaaggaaagagtgaaagaatgagacaatagtaatattgtagaatagccaaatattatcaaatatgaaaaataagttcacacatagtttaacaaagtttagcaaaccataaggagggcaaatataaggaaagccatatccaggtatattacagtcaaattgcttaaaataaaagacaaagaaaaaccttcaaaagcacctggggagggtggggagacttattaccttcagtggagcaaaaataagaatgatgtctgagttttcaacaacaacaataaatgaatgccagaatataatggaatgatactttttaaatgctaaaattatttttttaacaataataacaacaaaagaaaactaccagtcaagatttctgtacccaggaaacatatccatcaaaaatgataaaataaaatatttttcttaacaaaagagttgaaaaaagttatcatcaaaagactggcattataaaaatcataaagtgtattaggacataggaaaagatcccaaaaggaagcacagagctgcaggaaagagtgcaaacctctagaaatggtaactaggtgtgtaaataaaaagtaatatttatgataaaaggcataaaaatcatactttgaagttgataacatgtaagaaaaaatgtatgacatcaattattttgtcacaaatgatgacggggtctatatggagctaaactgtggtaaaattcctaaaaagttatggaagttgaagaattaataatatgaagtaggccatagtagatcaaggattcagattatgatgccaaaggtaacaaccaaaagaatgatttagaaaattaatgtaaggaaacactaaatgttaaataaacacaggttaagctgataaaggagtttgagggtggcaagaagaagccagaaacaaagagcaaatgtggggaataaaaggacaaataccactgtggtgaacataaactcaactatatcagtagttgcattaaatctaaatagtctacccaaataagcataaaagttctcagattgatttaaaaaataaaaatatatgttgtttattcttataaacatactttaaatataaagacaaaattcgaaaacaaagaaagagataagatgtattgatatatagatagattttaagacaataaatgttagtagacaaaatggaggacatttcataatgacaaaaagatcaattcaatagagggacatataatcctaaatttaggtgctacttatagtttcagatatgtatataaaactgaagttgacagaaataaacagagaataaatatatcctcatagttgaagatataaatccccatctaatattttgacaggaaaagtacacaaaatattagtataactatcaaagatttgaaaatgaataaacaattacatctgtatataaaacatgtgacattttataagtgttgtcatatgtagaacatcacttccaacaactatataatatgcatttttgaggaacacataggacattttccaaatagttaatatcctgggctatagaaatcgcataatttttttttttaagagacgaggtcttactgtgttgctcaggctggtcttgaacccctgggctcaagcagtcttcccacttcagtctcccaaagtgttaggattacagatgtgatgagccactgcattcagcttgatctcataatatttcaagttctctgacaactgtgagattaaactagaactccaaatctaaaacataatccgattggaaaatatccctggctcaaaaagaaattatggaaattaaaaattatttttatctaatgataataatgccttaatacatataaaaacattgtaggatggacaatatcaggaatctgatattgctttatagctttaaatgcatatattagaaaaagggaatagttaacaatcaattagcttcccactcaagaagaaaccaggaaattaaagcagcatatgacacccaaaaaatatttgaataaaagaaattataaaaataagagaaatcaatgatatagcaaacagaaatgtaatggagaaaataagaccaagaattgattctagaaaatttggggaaaaatttctttgcaagtgatcaaggaaaggagaaagtacagattactactctcagggatgcaaagagccattactagaaatcttacagacattaaaaaaaataataatgtattaagaacagcactacgctaaaaccttgacaatacaggcaaaatacagagatcctttgcatgggagaaaaatctccaaatttaaactgacacaagaagatctagaaaatctatgtggtcctagatgtgttttaaaaatgaaatctatagttaagtcttttacataaagaaaaccccagggaaggtggcccgattggtggatttcatcaaacaattacagtagaaataatagcaatcctacaaaaaaactcttacagaaaatagaaaattgcaatggtttctatctcattttatgaggtcagaagaacttatacactaaaatctgacaaagaaattaacataaaggaaaacacaggtcaataataatcacaaaagtagattctaatattctctgtgtgtgtgtgtgtgtgtgtgtgtgtgtgtgtgtacataaataaaatgttatatcatgaccatgcaggttttattccagtagtgtgtaatcttttcaaaatgtatgtgattcaacacattaacatagtaaaaatgaaacattctaaattatcaccacagatttaacaaatgcatttaataaaatataataactattcataacaattctcagcaaactagtaatgaaagaacacatcctaataaattgtttttgtaaaagacctctaatagtaaaatatcaagtgctttttcccagaggtcaggtacaggacaaggaaattcactatcaccacttttatttaatgttgtactggaagtatagtactagccagagcaatatagcaataaaataaataagtattaggtatgtcaaagaagaagtaaaccatctttatttgtagatgtcattatttttattgatgtcaaaataatatataaactattcagtttactcagtaaacttagaaaagtgtcgaataaaggtcaatgtacagaaatcaaatgtttctattgaatagcaaaaaacaagtagaaaatgaaatgtttaaaagtaccatgcttactagaactaacacacataaatgacttagaaacaagtctgctaaaaggtaatgtaggacctccactctgaaaactacaaaaaattactgtgagaaattaaagaccaaataaatggaaagttacgccatgttcatggatctaaacacttaatattgttaaatagcaagtcttcctagtttgatctgtagaatccatatagtccctctcaaaatcccaggatttctgtaaaaatttacaagctaattttaatatgcacatgagagaggaaagtacttagagtagccaaggcaatactaaaaaagggcaaagtaggaaggcttatgtatcaagactaactataagactgcagtaggtaagcatgtatagtataggcaaaagaacagataagtatagtaataacatattgccacataaataccccaaataaatacatatatatgcagggcacagtggctcacacctgtaattccagcactttgagaggccaaggcaagagtattgcttgtgctcaggagttcaagactagcctgggtgacatagtgagacctcatctctacaaaaagctgaaaaattagctgggcatggtgaggcacctgtagtcccagttactcaggaggctgaggtaagagaatctcttgaacccaagagttcaaggctgcggtgagccttgattgcaccactgcactccagcctgggtgacagagcaagatcctgtctctaaaaaataataataatacatacatacatatgtgctctaaaaagcacatgcaaagttgttcatagcaactttatttctaataatcaaaaactggtaacaatccaaatttctatcaacagtagaatggataataaattataataaatttattcagtggactgcatatagaaataaaaatgagccaactattgcttcagagaacaatgtgggtgaatcttataacctgttagtgagtaaaagaagctagaatctaaagagtctagtattctatttatataaatttcttctttttcattttaacatttattttaggtataatgggtacaacatgcgggtttgttacttggctatattgcatgacgctaacgtttgggctatgggttccattacgcaagtagtgagcgtggtatccaataggtagtttttccaattacagtcccctccctcccttccagtgtctgttgttctcatgtttatgtccatgtgtgctcaatgtttagctctcacatataaatgaatatgtagtatttggttattgttccagcattaattcacttagaattatgaactccaactgcatccatgttgctgtaaaggaaatgattttgttcttttttgtgattgggtagtattccatggtgtatatgtaccacattttctttatccagtccatcattgatgggcacctagattgattctgtgtctttgctattgtgattagtgtagcaatgaacatatgagtgcatgcgtctttttggtagaatgatttatttttctttgggtataacaggattgctgtgtcaaatggtagctctgttttaagttctttgagaaatctccagactgctttccacagtggctgaactaatttacatttccaccaatcgtgcataagcattctctcttttccacagccttaccagcatctgctgttttttgactttttaataataaacattctgactagtgtgagatggtatctcattgttgttttgatttccatttctctgacaattattgatgctgcacattttttcatgtttgttggttgcttgtatgtcatcttctgtgaagtgtatgtttggctgggcgcggtggctcacacctgtaatccagcactttgggaggccgaggtgggtggatcacgaggtcaagagatcgagaccatcctggtcaacatggtgaaaccctgtctctactaaaaatacaaaaattagctgggcatggtggtgtgtgcctgtaatcccagctactcaggaggctgaggcaggagaatcacttgaacccaggaggcaggggttgcagtgagccaagatggcaccactgcactccagcctggcaacagagcaaaactccgtctcaaaaaaaaaaaaaagagatagaagtatgtgttcatgttctttcccattttttaaatggagttgtttttcttttgttgatttgtttaagttccttataggttctgcatattagaactttgtcagatgcataatttgtatattctgtaggctgtctgtttactctgtggatagtttcttttggtgtgtgtgcagagacactttagtttaattaggtctcagttgtccatttctaaagctgcaaagtgaaatcagtggtgacagaaatcagtagatggggtaataactgaaaggaagcaaaaagaagccctctgagattctggaattattttataaattagtctgagaggagtttataagtgtagatttattttgtaaatgtccatcaaaatataccttgataattagtgcactttatttttgttatactttactttgaaaagttactgaataaatgtttcaagcctgcaaagtccaaaaataagatgtgaaaaaatactgtaacataacagaagcactcaacccagtctagaggattagtgaagacctctccgaggatgaggcaagttgagttagctaggccaaaaaaaaaaaaaaaaagaaaaaaaaaagaaagaaagaaagaaaaagaaagaaggaaagtaaaggagtccaggtagagaaagtatcatgtatcaatgtcttaatgtgggagatgacatgtacataaataaacaaattagtaagcaagaaaaacttggaaattctaatataaattagattcttgccagaagggtgcatggtgaggctgaaataaaaaaggggccagatcatgcaagggccatcacattgaaaattttgaacgtaattttattcatctttataagaccactgtggaggttacagcctgataccaagaatgtttttaagaagggcatgctgatattttcactgatattgtacatgtaccattcatagattgactcactaaaagttgcaattttatttaatcatctaataagattatttatagaatgtctgcaaaatgttagaagatcttccttataagaattagcatagctgaatggtttaaaaaaaaatgaaattctgaatcccagcatggatctattgcattcttgcaattgtccaaggcaaaaggttctgcttgcctgcttcataaacaaaatcaattaaccgagactgcagcattgcagtaaaaagtttaatttaagccaagccagccaagtggaagaactggagttatcactcaaatcagtctctctgaagtcttgaaggttaggatttttatggataatttagtgggcagaggggctagggaatgggtgctgctgataagttgaagatgaaatcataagagcatggaaaatggtcctcctgtattaagtctgtctctgggtggggcaacaggatgggttgagtcatgagtcattagtccaggtgggatcagtttgaaaaacatctcaaaaaagcaatcttgggttttacaatagtgatgttatctataggagcaattggggaagtcaccaatcttgtgacctctgaccacattattcctgaacagtaagcaattataaaaattacacctacattttagcagcattcaggcccctcccgtaatcctattcttgtggcctttcattagtcttatgaaggtggtttttagtctctgagaagggaggaggttagttttagggagggatgatcatctatgatcatctttgctttcaagttaaactatgaactaaatttctcccagtgtccaggaatggccaaagacagcttgaaggttagaagcaagatggagtcaactatgtcagatttctcttactgtcgtaattttgtaaaatcagtttcatcctaatctctggagaagtacctagaaatttgcatttggataagatatacagatctacactattaaagacagagctatcttacccacccccaccccagctatttgtctaagggaaatgaaacaatttgtacatacaaaaggctggcacacacatacgcattgcgcctacattcacaagagccagaaactggaaacaactcaaatatccatcagtaggtgaattgattaataaaatgtggtatatgtatgtgatgaaatactagtaagcaatacaaaggaaagagcagaagaacacttaatcgtaattccacttatataaaattcttaataataattaatgtatagtgacaaaaaggagatcagcagttgcctaggcctgaggaggagggggtgatggaaatgctgtgtaacaatcaaggtagtggttttacaagtgtgtacatctgtcaaaacatatcgaactgaaccatttaaacagatgtgcttcagtatatatgtaaatttttatctcactaaaattaataaaatattctccaagtgattcttgcaacattcaagtatgggaaccattgatttacactgtaatgaacaagttgctttaactttgtttggaaaccaaacaattttaatattattttaccatttaaattctgagctctttcagatagaaacttaagcagtgtgtatactgcttatcactccaaatttcacctgaaacaaattggtatatactgtttgtcataaaaataagaaaatgactttcattaaattatgctgacaatgagaatcttgtacaatttcaatgaaataactttttttaatgaaatagggtttcttttgatctcattcacattcagaagggaatttttgtaaatagaaaggactatattttattttatcctaagaaggaatttagtcagtaaaaatatgaaatagacacttgagtatacagttgaccagttattgccttgaagctactgcacctctgtaatgtatttttcatagcttatataatccgtgttaatatgctacattattaagttcaactgtgagaaatatagttgcttgaaaacagatttcttctgcatacttataaattcagtagttggaaaaaaattaaagaaatataattaaagattgcaaaatcaatttgaccctcacttaaaatgtgttgagtggaggcagcaagcagcagcctacatctgatgctgttctctccttgtttacttcacaaaactgtgcaaattagaactttaatttacagagctgttaaagcctcattaaaaactttcagcaagtatcctattttgagggtttttttccccttatatctaatatgcagcattatctctgttttgtgggcatgtatgaggcaatatctataggcatattaatgtaaactgcatatatgaaatgaaagtttttcacatggaaaggacactagtggtgtctgtcaattgcttcccaaagtgattaatttctccatttacttggtgtttattggcatctactaacactggatctctgttggatcataggaatataattgggctccagtgaaatgggagaattccctgacaccctgttgcaggatatgtgacagaggtgtggcttgtctgcttgaccgccttgcactcaaactccttgcaggagagggagcatgcagatgggcaggtgtgggagccagggcaagaacttttgggctccagtcccatggtagtatctaggggtgggtgcttgtgactcccaaagccccagtgggtgtgttacaatgcccttttagctgtgccatccacatatggcttaagtgttaaccagctcagtgctttcttggtacctgggttcttgtccggtgtccaagaagaatcaggttacatggataaactgaaggatggtaaatgtgggggattttattgctggatggaggtggctctcagtggaatggatgggaaactggaaaggggatggagtgggaagatgatcttcccctggagtttgggcatccggcggccaatctcctctctgactaaccccagccgaaatcctctcaatgttcagatgctccttttcttctcttcttctatgtggcactgctctgctattctcctgttcctctgctcttctgctcatggagcctggggtttggggtttatatgggtataggatagtggggcatggtgggccaaaaggcaacacttgggtgtgaaaacagaagtgcctttttttatttagggctgtgggtttccaggcttcagggtggggcctttgccagggaactgccctcttctacccagcatttccctgcctcctgtctttatcaccagtagacttgttccctgctcttacaggatttcatgcgtgtccgtgtgaagagaccaccaaacaggctttgtgtgagcaataaagctgtttatttcacctgggtgcaggcgggctgagtctgaaaagagagtcagtgaagggagataagggtggggccgttttataggatttgggtaggtaaaggaaaattacagtcaaagggggtttgttctctggcgggtgggagtgggggtcgcaaggtgctcagtgggcaggagtgggggtcgcaaggtgctcagtgggggtgatttttgagccaggatgagccaggaaaaggactttcacaaggtaatgtcataagttaaggcaaggaccggccatttacatttcttttgtggtggaatgtcatcagttaaggtggggcaggacatattcacttcttttgtgattctttagttacttcaggccatctgggcgtatacgtgcaggtcacaggggatgcgatggcttggcttgggctcagaggcctgacattcctgccttcttaataagaaaaataaaacaaaatagtattgaagtgttggggcggcgaaaatttttggggggtggtatggagagagaatggacgatgtttctcagggctgcttcaagtgcgattaggggcggcgtgggaacctagagtgggagagattaagctgaagggaggtcttgtggtaaggtgtgatattgtggggatgttagaagaaacatttgtcgtatagaatgattggtgatggcctggatatggttttggatgaattgagaaactaaatggaagatacaaggtccgaataaaagaaggaaaaaaatgggtattaaaggactaagaattgggaggacccaggacatccaattagagagtgcccaagggggttcagcgtaattacttgcttggttggcaagtttttgggctctatccttgagtttttttatgttgtcatacaccaggccagattgatttaggtaaaaacaacactcctcatttaagaatatgcagagtcctcctttttcagcattgagtaagtcaaggcctcggcggttttggaggacaactgcagctaaagagtcaacttgggcctggaggactgataaagtttgtgatatgtgtgtgatgctagcagagaagtcattagacaggctacagaaggtcatgacagacgttgaaatgcctgctattccagtaccgagagcaatcatggaggcagaaagtcctaaaccgaccatcaagggaattagtggaataactcttttttgtcatgtcggtgtcatgaggggaacagggagctcttcggtcccatttgcaaattgaattttgggggtaaggaagactagtgtacatgtggctgtccaattggcaggtagacacatgtaggtagaggatccacagaggaagaagagaccttgtgcgaggcaaaactggagatgtaaagtaaaaaggtgagaaggagtgctgaaaggggtgtcttgtacccagactcctagggatccacctagggcggcagctgtcagaggttgtaatggggactgatggggtaactgcgtagagggggaggttcgattttcatggtgtatgagaaaacgttgagtatctacgagcaacctttcactgttattttcggggctgggtataagtaaacaagaagagggcctgggaggagagtctgatgagcaaggggaaggtagccaaggatggagtgaaatacagggcacgtgtcttcctaagcaataattactgctaatgtttttaagtttgtcagtattgatagagggcttgtctgtaatatggagctggaaggctccaattgtttcagtgatgtgtgtagttggacttcggagatgaagagtaaaggaacatcgagaaggtgaaaggttacccaggggaattccagtgggtctttgccgagagatacataaaggagcagccacaggaatagtagtttgtgttgtgagaggtccaaatatggggggagtagagttaatataaggagaaaggttttttaaataagtgcgaaggagggcggcagcttgctgatgtgaaatgtctggggaagtcttgctgaacctgtctagaaagtaaatgagttcttcaggagggtaaaggtgagggctgttaaaggaagttcggaggtgtagggagacgggagatgttgcccagtctgtctgtaagacggggacagctgtgtaggcactggaagaaagggaaatgcaaagccagcagttgttcgctaaggagggattagaagcagctaggagagaatgggttaaggttgacagtgtggtggagatagctggggagaggtagagggtgacataagaatgggaatgagaataagagtgagtataaaagtaaagaatagaacttcatcagggtggaagtattggagggtgccttgccagcaaagatcatctatccactttaagagggagttaagagtggcagtttggggatagcaccaagagatatcagctgtgatggcttgaagaaacagtgtaaaccagcagtgtaaacaagagtagggcatttataagtagttgagaatggagaataggagtatgaccggacagaagatagtagggatgactagttttttggggctcggcctaagtggtggggtgacttcgtaaagccctgttgcaaaaagtagggtaaggacgaacagacctaatagaatgaagggatgtattaggctcataagggttattactgttcttcagaaatacgagtgagtttaagggaagtgggggagagtacttgcgacttccaggaggaagaggagggattaggctggctgtccgatggacacagctttattctggaatggtgaacccagtggggaggatcctgcaggcggacggcagtcggggtactatagatgactaagtagggtccggtccattgaggttatagagtttgaggggtcagattcttaacaagaactgatcgtccagctaggttgtcttcatatggctggggatctggagtaggcaagagaagattagcagcctggcgaatttcctgtctagcctgctagagcactggaagatagtagcctagagggctggtgtctgggatgaggttggggccaagcaagaaagtgcgtccatataaaagttcaaatggactgtaccctgtagcatctcggggacaggctctgactctgagaagagcaagaggtaaaagtactgtccaatcctttttaagttggaggctgagcttggtgaggtgtgccttttaaaagaccattagtccgttctacctttcctgaagattgaggacggtaaggggtatgaaggttccactgaataccaagagcctgagaaactgctttggtgatttggctagtaaaggctggtccgttatcagactgtatagaggtgggaaggccaaaccggggaattatgtctgacagaagggaagaaatgaccgtggtggccttctcagacccggtaggaaaggcctctacttattttgagggcctctaacagtattaaagcagcggcagccgctgcacacagacatgagggctaggttaaaacagtaaggtcaagttgtttggacagaaaggctacagggtgtggtcttggctcttgtgtaaaaattctgaccgtgctaaccatgcctaggaaggaaaggagttgttctgtagaaggtgcttgggtttgagagattagtcggacaggattggcagggagagcacgtgtgtttttatgagaattatgccgaaataggtaacagatgaggaagaaatttgggcttgattgaagtaatgggggctgtctgtgaagctttgcagcagtacagcctaggtaatttgctgagcttgatgggtgtcagggtcagtccaagtgaaagtgaagagaggctgggattaagggtgcaaaggaatagtaaagaaggcatgtttgagatctagaacacgataatgggttgtagaggcaggtattgaggataggagagtatatgggtttggcaccacagggtgtataggcaaaacaatttggttgataaggtgcagatcctgaactaacttgtaaggcttgtctggttttaggacaggtaaaatgggggaattgtaaggagagtttataggctttaaaaggccatgctgtagcaggcgggtgataacaggctttaatcctttcaaagcatgctgtgaggtgggatattggcattgagtggggtaagggtgattaggttttaatgagatggtaaggggtgcatgatcggtcaccaaggagggagtagaggtatcttatacttgtgagttaaggtggggggatagaagaggaggatgcaaaggaggctttggattgggaagaagggcggcaatgagatatagctgtagtccaggaatagtcagggaagcagataatttagttaaagtgtctcagcctaataagggaactgggcaggtggggataactaaaaaggagtgcttaaaagagtattgtctaagttggcaccagagttggggagttttaagaggtttagaagcctggccatcaatacccacaacagttatggaggcaagggaaacaggcccttgaaaagagggtaatgtggagtgggtagcctccgtattgattaagaaggggacgggcttaccttccattgtgagagttacccgaagctcggcgtccgtgatggtctagggggcttccgaggcgatcgggcagtgtcagtcttcagcccctaagccgagaagatctgggaaggagtcagagagccttgggccagagttccaggggctctgggagtggctgccaggtgagttgaacagtccgattttcagtggggtcccacacagatgggacgcggcttaggaggaatcccgggctgcgggcattccttggcccagtggccagatttccagcacgtgtagcaagctcctgggggaggaggttctggaggaatgcctggccgctgcggttcaggcgtttggaagttcttgtgtgctggagatgtggctggggtttgtctcacagtggaggcaaggaattgcaacttttttctattatggtacaccttgaaggcgaggttaattaaatcctgttgtggggtttgcgggctggaatttaatttttggagttttatttaatgtcgggagcagattgggtaataaaatgtattttgagaataagacggccttttgaccttttagggtctagggctgtaaagtgtctcagtgttgctgccaaacaagtcatgaactgggctggatttttatatttgatgaaaaacagcctaaacgctatctgatttgggataaagaaaaaggagcattaaccttgactatgcctttagctccagccacctttttaagagtaaattgctgggcaggtgggggagggctagtcacggaacgaaactgtaagccggaccaggtgtgaggaggggaggtgataaaaagattatagggtggaggagcagaggctgaggaagaattgggacctagctcggcctggcgaggaacaacctggggaggaagggagaggtcagatgggtctgtagaaaaggaagattagaaagactcagcgatgcttggggttggtactgaggggacaggcaggagggaaagaaggaagatttgggatgagtttaactggtcacagagactaggaagggactgatgtgtaaaagaatgcctggatgtcaggcacctcaggccatttgcctattttatgacaagaattatttagattttgcaggttggaaaaattcaaagtgccattttctggctatttggaactactgtcgagtttgtattggggtcaagtggcattgcagaagaaaataaggcatttaggttttaggtcaggtgtgagttgaagaggttttaagttcttaaggacacaggctaaaggagaagaaggaggaatggagggtggaaggttgcccatagtgaaggaggcaaaccctgagaaaagagagcatagagacacggaggaggggagtggggttcttgccctccagaaaagcagagagggggttgggacacggaaataagggattggggcacagagataagaggtcagggtgcggaaataagggattggggcacagagataagaggttggggtgcggaaataagcgattgggggtttcttgccccctaggaaagcgggacttgccgctaagggtgaaggagaaggggttgaggggtacttgcccctgccccaggaaagcgggacttggcgctaagggtgaaggaccaaggcaggtgtccctgcgtggtctgacacccttgaaacgtgagtgtataatcagagaggtgtccctgcaatgattaaacaccaagggaaggctgccttcccagtctgtgaccagcgccggagttttgagttcacggataaaacatgtctcttttgtctctaccagaaaatgaaaggaattgaaattaagagaagggagagattgaagtgtggcaccaagattgaaaggagaaagcggttgagggatagtgagggaggttggagaagagagtaaaaaaggccgcttaccggatttgaaattggtgagatgtttcttgggctggtcggtctgaggacctgaggtcgtaggtggatctttctcacagagcaaagagcaggaggacaggggattgatctcccaagggaggtcccccgatccgagtcacagcaccaaatttcatgcgcgtccgtgtgaagagaccaccaaacaggctttgtgtgagcaataaagctgtttatttcacctgggtgcaggtgggctgagtccgaaaagagagtcagcgaagggagataagggtggggccgttttataggatttgggtaggtaaaggaaaattacagtcaaagggggtttgttctctggcaggtaggagtgggggttgcaaggtgctcagtgggggtgctttttgagccaggatgagccaggagaaggactttcacgaggtaatgtcatcagttaaggcaaggactggccatttacacttcttttgtggtggaatgtcatcagttaaggtggggcaggacatattcacttcttttgtgattctttagttacttcaggccatctgggcgtatacgtgcaggtcacaggggatgcgatggcttggcttgggctcagaggcctgacacaggacttgtgggaatataatccatggctgtttgactactctgaactgttatactgctgtttttctgcccagggggatgttaaagccaaaagcaagtaatcaacaagattttttttaatcttaaaatactgaattaagccttaacctttaaaacaatttttgttgtagacatagatttgctatttgtttcagacatcctttaggcttttgatctagcacatgactaccccttcttaccgcattgcccctggatcccccaaggagagacacatggctacctcctttgtaccttggcccttgctgtactgatcacagctagttaggacagctatgaaagcctgctccatgcagaactgattctgttcgcatgagaatttggaattggaatttagagctaaccagttggtctgtgtttgtcctgaacataacataaaaattaattgaaatgagagacagagagaggtgtattgttgtgggggcgggtgagaaagtagggtgagggaagggaaggagggaatgctgaagtatagagcagagagcagcagagaggtgagaaacaggaaaacattcctcaaagcttctccactcccagtccaggaatcttgcctagccttgagttacagaacacactgttatctctggataatacatttcctattttgctcaaagtcctggtgtgaatatgcaaccagagatttttaacgtaaaaagaagctatgagcatatgaatggaagttgaagacctgagaatggactaagggactcagggttagggacagaccctaggaggaaagatggcattcagagatagatagttaaaaaacaatcaagaaaaagtagccagataagtaggtgaagaactgcttgacaatcaaggaaagattggtgaattaggtaatattcatttgcataaaatgttgcccagtggtcaggtaggcgaaaagctgaatataggcagttagattttaccatttttatgtttctatcccctgctacctgactaaactattttcaaaatgtattttatagcttagagccttcccaaaattcctagtattatatataaatttccaatacatattgatagctgaacaatcatattttcctggggtttattttaataatatatgcatttattttagccaatgatattcacaaagctttgctgaaatgtgttttgtttaacttggttctgtatatttttccatgaaaagccatactaaaaggacattttccaagtattaaaaaaaaaagcaaaaaaccctgcagtccagaatgcataatttgttctgggatagttaaaattctaagagaagtcttctttgttctttccttgctctttctttgttctccaaaagggtcgtatttaaactatgggtcatttctcatctgaatagccagggaagattagctacattgctactgatgcacttgatattttctcattacataacatgtggccacagattctagccagtctgataagataaaatgttcataatacttagaagataaaagggaatcatcactacttaagatccctttaaatccaatctgttgatctgtatgagattacatttttggctctcatttactagttccccctaaagaaagtcttgatatagctactgggttcctggcttgtattttgatagtcaaaacggcagtctggatatttttctactcagtagatacaatagaagaccaaagcttcttgcattgtagtcactgaccttgccatgtcatttcatattttctgtagatttggtcctggaaaatcaaatattaagcaagtttgacagttcagctaaattccataaggtcatctatcacattacatacagtaattgattttacgttaattggtctttagtttcatggttcatgtttctggttttctggtagtttccagaaactttcgtgttaaatgaagagctatgctatgtaaataaaattcagtaaaacttccctttcattttaattatgtgcttttgaaaactaattttattgggttctttaaaaaactccgtaggagtcaggcatgaattttctactctttagggcatttcaatcatgaaagaaagaaccatctatatttttcatcatctcaaaacaattttagaccactactatttgtaggtacaaataatgttcattgatttgctttatatttattaatcacctaatagttatgaaatggtgccctaagtactgtgactaaaaaataaatattagtaagttaattttactaatttttatccttaggagctttaatttatgctagataatatctgagaaaaagtcaatagtatgatgctgtttaaagaaagaaagcaactgctatcctgtgttgttgtattagcagaattgtcaaggataaaataaataaggtgaagattagactccacttggcaatctttagcccttgattggagtaccatgttccatttgggaaggcacacttattacaacatagacaagtttggcagaggtttcaaaagaaagcaacaaaaaaatgatgaagggccttgaaaatggggcctgtaagaaaaggctgagagacgtgagaatgttcaatcttgaggaaaaaaggcagaggggacacatgataactgtttacagatgcgtaaagaggtgttatggagagaagagggacctatttttctcattagtcaacaaagacacttcaagaagtaatgggtttaaaacacgtggggggaaattcaggttaattattagattaagttaggtaaaatttaaatatttaaaatgttatgattccaagcataattaggctgtggagactaaatcacattagaattggcataggaaagtgagatgaaaacaaattcaatctgaatgcagagggttaattattgcaagtttatatttgcattaaatgttatcatatttcaaaatactttcacatatattgttttactgatctctggacattcttaggaaagagagagtgtatcagctagttttacagctgagaaaatggaatttcagagaggcaaaatgttgcttcgaacccccacactccagattagatagacaaaactgctaagtgcataggattagacaagcaggactaaaagccaactcttcacattttctgtcaatatgtttcacatggtaccttgctatcttttcatttgtaatatgatttctattgtggagaaatattgtttacatagaggaacaagaaacatgattgaacttatatctgcattacctatatctattatttatctctcactactcacaattgtgaaataaactcagcactttggtattatattttgacaaatcattgccaaacgtaatacaatctccagttggtatgatgtggtgagaccctaccttctaccattacctagaggtggagacacatttcatcttttatgaatttcatattcctcatctgtaggaagaaaattataatatcttctggtttcttctagttttacaataaggagtgaatgagaaaatacctgtagaagtacctgaacttgttcaaagaaataaacttgttcaaagcataaactttgcttggggggaaatgtgtgttgtttttggtgtactgtggattttgataatccctttccagttttattttcaatcctaccttttttttttttttcatttcctaatttcagattcctgaggtcaaggccaatgtctttgttgaagcacttaaaatttgctagtctaatgtaggtgttcagtaatagttggtgggtgactgagttaacaaatggatgaataaatactttcagttggatattatgtctgggatatgagcaagaggtgataaatgccatatataatcatcttgttatactcctttatgtaatgatgtatgtttaaagtattttatagaaacatggtatgccagattctcagttagatcctgagaatacaagccactcaaagtctaaaggggttttgcagaccactccaatgctaggtatagacaaaactcttcccagcaaagcaaggtagctgatgccaaaatgttaccaaggaaagacccattggttggttgccaagacccttatggagtctgagaagatgttttagactccctcaaccatgcacacaaattgtgtaaagtaatccaggaggcagcctaaatggaaaggctgttagtatgctgagcttgctaggaaatggaggaattttacggaaaatgtcagcctctgtagactcctgtgatgctcgctagggtgccagccttccccagggagcccacagcacctggcaggcagactgcagcagggagtctcactgggaggatacaaaagagcttaatggccccctgtgcataatgttgaaagaggctgcaatttttgttttcttcggagattaacgtgtgtgtattgcaggttcaaaatggtaagaatcttaattagagttgcaggaagttgcataatatactccatgtcttactttttccgcacaccaaataacagaatctatttgccaaattatgaaggttgatggagaatgaaaactgtaatttgagtaaatgggagccctgcccccattttttccagttagtcacaaagtttaaaatgcaaagaagtaaatctcccaagggagcaattctatttcatctgtggaagaaagacatatgttgttactgatgaaacctctgttgtgaaagcagagccaatgctgggaaaaacttgaaggaaaaactagctgagagccctctgtctcaggagcctgtggcctttgggtccacccagggctgcctgtgcctcttcctgaggcttttcttgaaggcctgctctttcctctgattaccttagggcaattgcctgcctctcttaagagaaaatgtacctgttttgtgccacatcccttcaggcccctgagctggacagtagattgatctgacagatgtcactttgatattaaatcaatagtaccaatatgtttctgggttttcctggccttagcaaggttttatgttcacttacttagagacattctggagaatatctcagaactcaaaacatgagatcaaattggagttctatgggagagaggatattgaattacttggctttattatggctgcactcatagggccagccacgtgtaaaagtttcattctctttttttgaacaaatatttattgaaaacaataaattaccaagaactgtgttaaaatatacagatgtctaagcagacacggcacaatctatggccctaagaagtctaggaggtacaatattttatataaattattcatcttcattcaaagttatttattgagcatctactatgtgccgtgcactgtgcatgcccctggaaagcataagagacaaaattcctttctttgtgggagctgtattctagtgaggttcagcaggtgaacagcaatccgtgttaattatttcttcttccactgaaatgaaaattctatgtttctaaaaaatattataaaagtactcttcaaacctcatattaagaaagtcaaattgtctttagccacatttgataaggattaaagataatcttactattttattttaaacatatttagagcagtccttgtctgaaggaagcttgtgttgaattttttataaagtgagttaattaccttctaattaattttgtgtgtgtgtagtgctcacctaacacaagattttcatgctgaatttgctcccccaaaagaaaaacaattcctatatatgttgtaaagggtcgcaagtcagaactgagatggaggcaatacaaatatataaccagcggcctcagacaagttcccaaaattgggaagaatgaagagatagggaatgactgcagagcctttttcaggaaagcatgagattggaagatgaatgctcaagtaaattagaactcaggaaaagtactgaacagcaggatcatatcatcaaaaatctggctgataggttttgaactcactgaactgaatctatttagaagtacattttgggaagactaaataaacatcaacactatggtctattctaattcaggctcttgctttgtctattttccaggtgataaaacactgattgttattagtgttatcatcaagcatattgagcagtcaatctgtaagttaatagcaatacacagccatatagtcctggaactagaaggaaagaaaatgaattttttcttttttttttttctttttttttctgtagaggggaagaaaaattcaacaccttgagtcagctgcgactcaagggtccattataacttcgagatttttaacagcctgtgcctagggtatgggagatgaattttgttccaaagtggtgacatgggcagatataaacccctgggagcaatttcaggcaagttgagagtccattctaaacaaaaatggacagaatgtggaagatggaattcccacacttgctttctgaccttggctgatattcctcagcagttggtaattagaggaaatactgaagctgagaggatgaaagaataaagaagagtagaataatcagaattgaaagaatgtaaataagtaataagatggggcaaaaacaggaatggtgtcactgacaaaggtggccacactttgcagtaagatgtgagtgggacatagaaactagatttggttgagtaagaggaaaaccatatatacacacacatatatatacacacacacacacacacacacacattaatatatgcatatttaaaaatatatacatttcaaaagctcatttatgttgaatactaagtgggaaattcatcagctgtttggcttcctgtctgttttattctttgccattgcagacttgagttgtcttcctgaaatctttctgggagataactgcatgcccagcccttttctttcatcagaaaaagggtattctgccctgagtcagaagcagggggaaaatagatgataatatctacatgttattgctagaacagagtcaaataaaaattaaaagtccatcaagtgatcaggttgaagtcaataaaaaggtcaataaaaagcaaggatgagccaaaaaagaggacttggtgtactggaaaatgccaggaaaaataaaagacagaaaaaacactgtggcaagatcttctcctgtggcctcagggaagtgcatgataaaattaattgaagcttatcacccatgaaaaagggctacagttggagcaatagctgcacggactacataacagtacaggttctttagcctaagacaaagataacagatttttgttttacttttgcaagcttttttaatatactgagttaaaactctctttttttgcctttattcaactgaatgctgcattttttgagcaatactaagtgttgattggcttacttgaacagcaatttgttaagaggcctgctgtgtaccggccattatcctaaataccagtgtacaaagattagtgatgtgtctatctgctttcaaaactcttataatctgtagcaacatgagattaatttttacatatggtttatatataacaatctaattccaatacaatcatatcattctccatatctcataagaaattgttttgggacattatttaaagaaaactttatacaataaatctataaattgttagtagatttgactcctcctttagatgaaagttttcatcttgtcgtttttttaaattcaaaatatgttattttaagttgatataaaacaatcatattagcaaaatgcatccacattgaaaacttagctggatgggtaaagatcgctctattaaactgtgatgtttaatactgagtgtcaacttgattggatttaaggatacaaagtactgatcctgggtgtgtctgtgagggtgttgccaaaggagattaatatttgagtcagtgggctgagaaagccagaccgacccttaatctgggtgggcacaatcaaatcagctgccggtttggctagaatataagcaggcagaaaaaggtgaaaagagagactggcctagcctcccagcctgcatctttctcctgggctggatgctttctgcccttgaatattggactccaagttcttcagttttgggacttggactggctctccttgctcctcggtctgcaggcggcctgttgggaaccctgtgatcatgagttaataaactcttttacatgatattctcatgatagtgaataaatttcatgagatctgatgggtttatcacgggtttctgcttttgcttcctcctcatttttcacttgctgccaccacgtaagaagtgcctttcacctcccaccatgattctgaggcctccccagccatgtagtactgtaagtccaattaaatctctttttattcccagttttgggtatgtctttatcagcagcgtgaaaacaaactaatacaggcactgttccatctccaaatggtcataatttatcagttcaaaggaacgtactttgcatgccaccaaagggttttctaagaattgggtcagcaattttaagtcaaggttgttggttctgagttgtacctttgagtcagtctttcagcattttagttctcaaatctagttttctactctttccaatggggttattcatccaatagacatgggaaaatcatcctaatcaaaacaaatttatgatcatttctctctggcatgactgcatcaggtagcttaaaccatagaagtttattgtctcacaattctgaaggctagaagttcgagaaaaagatatcagcaggattgatatcttctgaggggctgtgaggaagaatctgttccatggttcacccagcttctggtggtttgctggcaatctttgatgttccttttgcagtgtcaccccattctctgccttcgttgtcacatggcattttctttgcatgcacatctgtctcttcatatggtgtttcttttataaagacaccagtcatactacagtagggcctcaccctaccccattgtgacttcattttaatttattacatctgcaaaatccctatttccaaataaggtcatattctgaggtatgagtgggttggactacagcatatgaattttggggagacataattcaatccattataatcatactgcataactgacgagaaagtaaagaatcaatctgatgcaggaaagataacctaatcaaaaagaggaattaaacaactccaactaattccttacatttaatctatttaatataaaattataattttgcaaacacagcatggtgcactatggtaactaaagcaattggatgatatttcaaaagctttaataactagtatttaatcacagatgctgtgtgtttttacctgaaattcatcctggtaatgcaacataattaattgcacaatttattttagcatgagttttcttatatttatagagatagcatagcaatcttgttttcaaatttccctcagaatgcttgagatcagacattattagcatggagacaatagtttcattgtcaactcctgctggtttgggtacatttacagtaataaccacaatccactagcttgaattattgttcaacattctatgtgacttcatgagggtattaatatgcaagagagttatttgatactaatcaaagatacacatttgtcttcacacttattacaatatggtaaggtaatcacataaaatacttaagatggtagacttcatacatatatatatatatacttttaatgaatatactaaagctaaccgttaatggaagctttgacagaaactcattgttcaatatccaagcaaatcaattttggactataaatgcagaattctaacaagcaaaaattctaatcattcattttatttttctgttattcgtggcttcttatattgttaaggcttaacatattaagatgcacataggatttaatcttcatgagagagcaatgaatacatcattgaatacataccaatcatgtgtaattgttttcatatgtatgtaagcccagcggaaaagagtcgttcattgacagtactcattttcccatttggtgtattttcctaattgtacagtataacagttatagtaaatggttataaatattaccctttagctgtaacatctatgacatttttgttgatcatgataatatgtgattgtttagtcaactgagtttattgtaattgagattggaaatcactataagagtgaaattgaatatatagatagagaaataggataagttaatatggcagctcaacactgaacacagactacaacttcttgaccaccgaaatatgcaaaatattatataatagcttgtatctggacagcgtgctaagctgttcacttgttctttatcatttaatcctcttttcaaatatgtgagatatgttctgagaagataagcaccttgttgagtcatacaggtaatacattttaaaggaggaatttatatacacttaagattgtgtgtgtgtgtgtgtgtgtgtgtatgtgtgtgtgtgagagagagagagagagagagagagagagagagtttcaggctccaagacagatattaatggtagactgcctttgttgcataactgtagcagtggtgtacaactgctactcccatcttctcagtacttcatctctttctttgaatcaactacagctattctgatggctagattatgatctgccagtttgagaatccaactcttgctggccagagacttacagttaaaaaataaatcatttagagtcatatgcttatgtactactgggctgtgatcctcaccctaaagctcactttggcatagctctttacttgccatcgattcttgacagccttatttcagaattcttacagacacagtgtctatttaattttaatacaatcaagcaatggtttctggacatatttggctatttctttgaaaacaatggaatctgtcttatgggcaaaatgacttttttctgccctaaatgctgacactgaattgcgttcaatcatgacagaatttgtgcaatatgaaaagtttgtccactgggtggacaatttctatctagcatttttctctccttcagggatggactttaagttgatttgacaaaattggtttcatatgaacccaaatgcaaaccctatattatctttaaacactggtttctgtgaagttgtttgattaaactaatactgttgactccctgttttctgttttatttctttaagatgacatcccttattctgttctgctacctgggacattgctcttctctccatattaattaattaatattgtttcctaaatctgtcttcctagtctctgtgtttgtcttcaccatgtgtattgggatatattctcgaagggtttcatgtgtgaattccctcttgagtcaaattgtacatgtaatttcccttcattttaaaaataaataagaaatatgagaagaattttcaaaacttttatgttctatatgctttcctctggtttggaaattaatctctgaatttatttatattttaggtattgcaatttgagaattagaagagttgtttttacaaaacacagaaaacagcttttgttttaattatttttcccagtgtgtctaagagtcaaaaagactctgtattagtattcactggcaaacagaacacaatgcagagcagatatcctagaagcaacatgatagatccaatcatccgattcattatagtacaaatattgtaatcaatcataatattcagtgttccataaatccacaattctgtgaaagggataagaaaaaagaaattaagctatcagtgagtttactaaaaaaggaaaagagatttcctgattatcatcattcagaattagtcagacatatacatggtaatcattcatattttaagcaataaaaggaaactcaacacaaagcctggaaagcaacagccttttatttttattttctctaagatgtgaaaaaatagacctaggtgctaatttaattcccttttaagttaatgacataatgggtttgtggagcattaaatagggaataaatatggccttacatttccatgtcggagctaaatgctttctcttccctcagcttctaattcctcagctgagggaagtgatcagcagtcaacgatcacaatgagggagctacgcacacatcctctggtttcctgagctttggaacacttaatgcttagtgcagcttctctattttgagttctaccatgaacccctctctgatgactcccacatatgtcttttttatgtaagcacaccaagttcagctatccctgtaggtagacagcatttgagacttctcagttgggtatgatttgagaagataatggagctgatcctcttgacataaactagcctattggtcctgcccaaactggtgttccctggaacagaggcctaaaaacaaaatatatttaaaatgttcaaatatatttagaaaatattgtgttaaatcaagttagccagatttttgttgctttcattgtcatttttgttaatattgttgcatgatttccagaatattcagtatgcaaataaatattcattatgaatttaacaaaataggtattttctaaacttctttgaccttggaactcttgttctcccttcccaaccccaccattgcacttattttaacattgcactcagcagggctatacgcatcaacattttgggaatttgaggatgaagatatgtttttcctattaaaaatgaattcttatcccactgggaaagaaaacacattaagcttttatcagtctttaacattttaacatggattagccattctgctctttctggattataagcagctgagagcaggctttcattatagggagagggaaagatgatctgaagtgtcatgtgtccccagagaggattttcaagtggaatgccaccatgagagttcctgggctagcagaggacaacttcatatagtgcagggttgcagcaaggccactgacaccagctgtatatagaaagttatgtttgcctcagtttcttcagccaaaacagaggaaatttactagatagtagctatctccctcttagctctaacaatacaatctgattatcttgatggctaagtgtgggaactgagagagttagaagagtgggggtcactagttgaaaaagcaaggttagaaatgaatgttttctcagtcatggctggcctagggctggctctgcaggagttcatgattctcatctccccaaacaacaaagagccatggaaaattcatcagataacagtaattcaacagataacagtataaagactatacatatttttaagatagatttaaaaaatgcatgacatatttctggcctccaatgagtgttcagtatgaaaaaataccaactagatgaataagtataggcaagcaaaagattctaagtataagaaagtgtgaaaagtaaaatttattttatttttctttgaaagagcagtcttcccaggtcaagagattagaaagacaagtaaggtaatgcctcttctctgaagtttagaacagatgaaagtgacacataaaagcagaataagataaatattatatcatagtaaaaggaatgagaggttgtatgtagagtggttgtggacttggactcaagagcatgtggacacaaatttctaggttaaattccctggattcagaacccatttctaccatcttactaggtctgtgtcctcttgtgtaaatggtagtggtgatgataattaccatgcctttctgctagaactattattaggaggattaaagaaaattaatatgtataaagcatctagaagagtgcctcacataaaataacaaacataagtatttactatcattaataataaattatatccaactagaatcattataaggggttttagaaaagaagtagcaataagataataagtgaagaatgagtaaatttttgaagctacaaatggattgaacatagtactctagggagagggacaatcatgaatgaatacatcaagatgaaaagtcaaagggtaaattttagaaatagcaaatagattggtttgctaatataacatactggccctttactgatcatgttgatcattttgtgagaaaacagtaggaaatgacttcagaaagaatatagtttggtaaaaaccattttaactgtaggagaatgaaactggattctcatctctcaccttatacaaatatcaactcaagatggatcaaggacttaaatcaaagatctgaactaaaaattctagaagataacattggaaaaacccttctaggcattggtttaggcaaggatttcatgaccaagagctcagaagcaaatgcagtaaaaacaaagataaatagatggaacttaaccaaactaaagagcttttgcacagcaaaaggaatagccagcagaacaaacagaaaacccacagagtgggataaaatcttcaaaatctatccatctgacaaaggactaatatccagaacctacaacaaagtcaaacaaattagcaagaaaaaaatgaacaatcccatcaaaaagtgggctaaggacataaatagacagatctcaaaagaggatatacagtggccaacagacatattaaaaacatgctcaacatcgctaatgatagagaaatgcaaatcaaaaccacgacacagtaccaccttactcctgcaagaatggccataatcaaaaaaataaaaaaataatagatgttgaagtcgatgaggtgaacagggagcatttcttcaccgctagtgagaatgtaaactagtacaaccactatggaaaacagtgtggagattccttacagaactaaaactaccattagatccaggaatctcactcctgggcatctacccagaggaaaagaagttattatatgaaaaagatacttgcacacacatgtttatagcggcacaaatcacaattgcaaaaatatggaatcaacccaaatgcccttcaatcaatgtgtggaaaaagaaaccactgtatatatatatacgtgatatatattgcatatatatatgtgtgtatatgtatagtatagatatatgtatatatatagtatatatacacatgatatataatgtgtattatatattatatattatatataatatatataaatatatattttatatatataaatatatatgatggaatactactcagccatacaaaggaattagttaatagcattcacagtgacctggatgagattggagattattatcctaagtgaagcaactcaggaatggaaaaccaaacatcatatatgctcactcaaaagtgggagctaagttatgataatgcaaaggcataagaataacacaatggactttggtgactcagggggaaagggtgggaaggcagtgagggataaaagactacaaatagggtacagtttatactgcttgggtgatgggtgcaccaaaatttcacaaatcaccactaaagaacttactcatgtaaccaaacaccacctgtgcccagtaacccgtggaaataaaaaataaaagaaatttttgcccaaaccaatgtcctggagtgtttctccagtgttttcttctagtagtttcatactttctggtcttacatttgagtctttaacctatttaaatttgatttttgtttatggcaagagatagcattctagttttattcttctgcatatgtatatccagttttcccagcatcatttattaatgagactgtattctccctaaggtatgttgttcacacttttgtcaaaactgcattggctgtaaatatgcagatttatttctgggttctttattctgttcttttggtctatgtgtctgtttttatgccagtaccatgttgttttggttactatagctgtgtagtataatttgaagtcaggtaatgtgatgcttccagctttgttattttttgctcaggatgtcttggactgttctaggtctttcgtggttccatatacattttaggattttttttcgatttttataaagaacttcattagtatttcgatagggattgcattgaatctataaattactttgggtagtatggacattttagcagttactgattcttttaatacatgaacatagaaaatgtttttatttttcatatctttttcaatttctttcatcaatgttgtattgtttttattttagagatttttcacttctttagtttattccaggtattttattttatttgtggcgattacaaatgggattactttaattatttctttttcagattgtttgctgttagcatacagaaatgctactgatttgagggaaactcttctacactgttggtgggaatgcaaattagtatagccgctacgaagaacagtgcagaagttccttaaaaaagcaaaaacagaatggccatatgacccagcaatcccactgctgggtatttatccaaaagaaaaacatcagtatatcaaagagatatttacactctcatgtttatttcaacactagtcataatagccaagatatggagtcaaactaagtgtccatcaatggatgaatgaataaagaaaatgtggtacatattcatgatgaaatattcagccattaaaaaagaataaaatccagtcgtttgcagcagcttggatagaactgaaggacattatgttaagtgaaataagctaggcacagaaagacacatattgcatgttctccctcataggtgagaactaaaaaaattgatctcatggagacagagagtataatgatagttatcagagcctggggaaggaaatggggagggggataaagaagtgttcggtaatgggtaatgggaacggaagtacaattagatagaaggaataggatctaatgtttggtaacaaaatagtgtgactataattaacaataatttattgtatatttgaaaataactagaagagtggaattggagtgttcccaacacaaagaaatgatgcttgcttggggtgatgcatatcccaattatcctgatttgatcattatacattgtatgcatttgtcaaaatttcacgtgtggcccataaatatctacaactattaagtaaccatgaaaattaaaaattttacaatttaagaaaagttaacttgacgagaaaaagaatacagtttggaagtcttcgaggatagataggaagagattttccatttaatttggttttaaatgggatcttgtctatgtttgctcagggtaatcatatgaaaggcattataatttgaaagcttaatctcaaaatagtactttttttggtaaccagttgtcttgcagcaaaaacaaaagcactgaacttgggtcaaaatacgtgaattcaaatccatactttataccttcagaatcaaacactctaagcctcattgcgttactctttaaaataaggaaagtgcatctaaattacacattgtttttagtagcaaataagttagatgaaaaagcatcaaatgtaatgttgggcatacataaattttcaatcaacttttaactatataatattatctgaacaagacaagtgaagaatacaattgtaattttttaaattgcaaggcaacagtttctaccctaataatatctacattttcctcataaaagtcagtgcatcagattctatacagtatgctcttcaaattcttggctccaaagttagcaaattaaacatcccatctcatttctagtttgcagtgaaattctcaaaaagtttccagaatccctgatgttactcatcctgagctacatctgacttctaatcagcatcttttacttagaatacagatagcaaatctggttggcagttattttccaatgattcttctgccatactgatgctttataatggctccaaggaaaggccattctacaaataaaagcaaaattaataaaagaatgcgggataattgacagttttgctacaacagcatttaatttgaatcctttgaaacttactcttcactcattgatttttaggctcacaaattctttgtgtgaattctctcttttacttttgcattgtgaaatgatttatcatttgggtaattttccagaattacactttattattttgtaaatggcatgcagcacagatggatattagcaaggtctctgtataaacgccagcaatagaggtggtaacattgccctgagagttttctcctgaaacaaatcaaataaagaagagaaagcattgccaaagctggccatgacagaggaagtggatccaataatagacatctcgatggatacatatatatgattcaatattgtgtgacctttactttcaaactcactttcagaaaatatattctaaaggggtgccaaggatattgctgtctactctctactgacttccatgaaaggaaacaccattcctctgtatctcagtcatcaatgagtacatttatgaaagagtttggccattgtcaattctaatgccgttaagaagaacttgagcatagcttacatttttttcctcattttactcctacttgtatattgctttggcatatactattagtgcaatgctgtgacttccaaaacttctcagaaagtaacaacttggactgttaagagactccagcatttgaaatatattttaatgcaaactgtctccctgaagacctctatccatagctaagatagttgtatccgaaagctttgcgcttacttctttgcagtgctatttgtaaacattggcatagtaagagtgataaatttctatggaatcatctttatcaaacatacattatagaagtagaacttattccagctaaccacattatcatgaatagcattttccatatttctttgaaacaatacaatagaaacaatattatcttaaacattaagtatccccattgattggtccagtgaaatactgcttggaatgaaggcttcaactttaaatctatttaatcaaatttggtaaaacaatcatggatcaaatatattattaatgttacgtggcttttattattattattattattgcaaaaattaggagccttggtttttgtggccttattctatttcagttagatataatatctcctggccttgggtgctttttacatacaaatggggtaaaatagttattataaagaatagagattgaatagatgtgcttagagtaatgtctgacacaaagcaagcactcggcccagcacagtggctcatgcctgtaatcccagcactttgggaggccaaggcaggcagatcacgaggtcaggagttcaagaccagcctggccagcatggtgaaatgctgtctctactaaaaatacaaaaaattagccaggcatagtgccatgcacctgtaatcccagttacccgggaggctgatacaggaaaattgcttgaacttgggaggtggaggtagcactgagctgagatcccgccattgcactccaacctgggtgacagagcaagacctcatctcaaaaaaaacaaaaacaaaacaacaacaacaaaaaaagcaacggctgttaattgccaggaagaagagctcctacaattgtttcatgtgcatttaggcactctcttccatgtgagaccccaagcagtcagcaggactatcaaaggaacccttttaagacttagatatctatttttaattcttgcactgcatttctactttgataaggggaaaaggcattaaaacacatttttgaaatgtaaatttccaaagttacaaaaattaacccaacacatcatatgctctttgaatcacttaaattggcagctgtcttataatgataaaagacctacggcgttcttagatgatgtctacatgatgccagacagctaattgaattaaggaattaaggaagatatcaactagtccttccccttatttgccagatgaagaaatggaggccaagaaatgtgtagtgatttatttacatcaggggttgagtctgttggtcgtgagaacttctagcctagttattttttccaccccatctatctgtcctgaaatttggtttcttattgctgcagcattgaagagatggaaccactaaaaaaatactgataaaaagatgtttatccagaggcaactttaatggcaactcaaactatttgaaatatgatggaaaatttgttactgagtgaaaaggccatcgcacaatcaaaattgatgtttaaagctcgcctactaactcttccacactatccaatgtagtggtcctccttcattttgctctttagagtttccctaattttctttatgcatgcatctgatttcatcttactttagagaaaatactaacagtgtatgtctagaacatggcagattggagccttatagcacgagaggcagggaaaagacagctaatagcgattcactgataggagaagaaggggtcccatattgtttgagttttagataacgtttaatgatcttcctggataacagattctatgaggattttttttttttgcttgtttaaataaaagctgattcaatgataacaaaaggagagacagtaacttcagaaaaatatagatatgctaattcttacatttgtagagcccttttgatattaaggttcaagatctaaaaatgtaattctcattcaagaccgtataaaaattgttagttctatataagcatattgaatcactgatagattaaagcacattcatcatactctagaaaacaaggaaatgtgtaatatatttgatgtcatttttattacaattgttaaaatagtgaagaataaacctgttaactagaaatctatgcatgcagaatgtcttattacctaaataacaccagataaatgaggtgttactgtccacagtctcacaacagagacatgaaaaacccttctttacactggtaacccttaattaaactgaatttttggtgtgtcccttcaggagaaggtcaccatatcagcaataattaggggaaatggcattgtgaacattactggatgagatgtggtgtatttcttactttcaattattgcctccttgtttgaatcattagcatttggcagatttgttgctgaatttgttgttctgatttaaaactcggtgtaaggttgaatatgttcttatcttgatcttatatttctgccatgacttgcatttcttgctgagtttctgacttgaattgctctatgtttttgctgagcttttgctttgtcttgttgtatttctatctggaggggtttccctccgcctttttctttttgttatatctcttctttggcctattgtatttctctggcccattcattagctttttttttcctttaaagttattctcttgttcagtatatgcagtacctaatcaatacgcttccttgcttgctgcaggatttccaacttactgtgttttctgtcagctttgatactgcctgagaggggtttctgtgctttggctaatatattgttgtctgaattcgcagtgttttcagctcattacactgactttaattttgatgtatttgtattttatccagttcaagtcatgtttctttcctctgtcaatttaattactttctgcctgggcaacattgtgtttatacaattgctgctaaagcgacaaaaggtttctatttaaattaccacccagagcatcagcaattcagcctaaaaaatatgcagaactcctctgattgatgtcttacctttctgtggataaggaaatctagtctattgagaggatcttctttatagaacatagtcaagcctggtttatagctgtagagtcattaacagaggagatgagtgtagggctatggggtcactgtatgacttctctgtaagaaaaaaatgtatgactaggttctattcagtacaagtcatgtcctaacagcaggaaaaagaaaactttcttaggtgtttaacttatatttaggtgggctacccaagctccagctcttatttttctatgtgttatatatattatacacatttctgggtttgaatcttgttctttctaataattttgcattgggctgtgtaagtcaggaacattgaatttccattgtgtacataaaactatagcaactggtctaaaaacaaataatgtgggaaacatagtaactgttcctgttttcaaaggcttacaataatgcgaaaaaaagggaaaagcttatgagcaatacatctttgaaaacagaaacagtgaaaacactccagtaaatacataattggttattaatagaattttaaattggagaggcataacaattgcaacagctcttggaaatgcttaggaaactgaggcttataggtttacccgaacatatgtcatagataacattaatcaactagctgatgaacatgaccagcaaatgcattgattgcctgatcagcaaatgcttcaactgttttgttttacaagacttaatatgtttaaacaacaacttactctttacctactttttaaaaatatccttctgtattttctgcaacaaaccattgttgagtccctgtgcttaacaaaactgtgcaactgtgctatttacccagaggaagaagaaagatttttttaagtcagttcttttctggtaagtgtaacttttctagtattggataatctttctgagcctcagttttcttatctgtataattggcataaatgaaccatgagaaacaaataaaatgacatattcagctcagtgtgtgtcacatggtgagagacccattaagtttgctcttttccttttgcctttctcttttcagtgttcagtcattatactgtcaaataaattggagtttctggcttttctcacactcaagattattatgatatactacactagtacatctgaccttgataaaaagcaattttctatagtttaattgtatagcaataggatgggaaagtctctgattctcactctgtagcttcttcttcccagggctggagtcatttaatctctacctttaggctcattctaccctggtcccttgggtcatgaattcatctggaagattcagacttatgctttaaggctctcagaaactcaatcttgcagaagaatctggcctccattttgtacacactttgttcaaagagcctcctagcaccttcccaagacccacatataccactcccattttctctcttggttctggtgattgactctctttatgttcttggaaagctgcctagtatcctaaaaccagtattgctgcctggctgttaccaggctgcaccctcgactaaagttgatcccctgcactcatctttggactctagatttctattacatgcacatcccttgtgccaaattatgctggcttgtctggccttccaagtttcacctattgttatgcttatttgtcagttcaagtctctattccagctctatcccacttccttctttctttagcctgtgtccctctcttggatccctgaaacattttgagtactagctactcctatgtcctgcccatgtgattaagaatgatacttttctcccgtgcttgcagctgggtagtcatactccatacccacccaggtaaaaatgtctggatccaaatctacctttcataacagatctgatgtgctattctagacagctttactccatgatatattgcagactttatgtaggttaacaaagcattatggtgtcattcttgtgacagccctacattttcattatgatttttgtgtttgcggtcctttttgtgacaatttcttttagatgaaaatgcttttaatgaagcccttttggtacttgggagcctcactggaatggatttagtacaaacttgccttatttcaaatttatgttcaatattgaacaacactgttacccatatttaggacagtagacaggtaaaggttgcagaatttttatgaaatataaagcaatatccactgttataatgaagcactacataaaattgtataatacgtgagtttcttattcctcaaatagtctaactgattgttcattgggctcactcagccaaaagtagagggaaactttgtacagacatcattagtttttctccatttagagattaatcatgaagagctctggctctttaattctgtaatttgtatatttaatgggctgctgcagaatctatgacagtaattagcatagcctgaaaactcattaatacgcaacaacatgattaatgcagcattaatgcaaacatgactgaagttatttgggttatgtagtaagaagattaaagctaaaatgtcctgtttgttttaccagtggtgagtataatagagtggcaaaaaaataaaataaaaacaggtatcaaattagctgtttaaaaaaaagaaaaaaaccagcaaaatttaaatcaaggtgattttatttttcccttaggtctaaaatttgggatataagttatgttctttacttttatatttattcatttattcataaatttatcattactgaaggaaagttcattcaaccttttagtttaacatagttaaccttttagcagctttaacataatattattagtcttacattggaaacaattttaaattgtactaatctttgaccaatacattacacatttctgttttgaaactaatatatattattggctatgccaaataattaaaggatttgttcctacttattcagaagttacatattatgccctcttctcactgtgttcacctcttaaataaatgttcaaatactttataaaatactaccataaaactcatttttttaaacaaaactatcaaatatgacatgttaaatactgaaataatcaataatgtttggggatgtaaaagtatataagttttgcttgttcttgctgtctcatgtaatcatattgaagtcctctcattcttacttttttttggcttttcttttttgagacggagtctcactgtgtcgcccagactgcagtgcagtggcgccatctcggctcactgcaatctccacctcccgggttcaagcgattctcctgctcagcttcctgagtagttgggactacaggtgcccgccaccatgcccggctaatttttgtatttttagtggagacgaggccgggtgcggtggctcgcccttgtggtcctagcactttgggaggccgaggcgggtggatcatgaggtcaggagttcgagaccagcctggccaagatggtgaaaccccgtctctgctaacaatgcaagagattagctgggcgctgtggcgggagcctgtagtcccagctactcgggaggctgaggcaggagaatggcgtgaacccgggaggcggagcttgcagtgagctgagatcgcgccattgcactccagcctgggtgacagagcgagactccatcgctaaataaataaataaatacataaataatacagacggggtttcaccgtgttggccaggctggcctcaatctcctgacctcagatgatccatccaccttggcctcccaaagtgatgggattacaggcgtgagccacagtgcccagccattttttttttttttttttttttttttttttttgctatttagtatgacctgttttaatagcggtcctaaactttaaatgacttatttttcaatcttatagtcaaatgtcaagagtcattaatagtatctcaaacaaaacttgcattttaaggttaagcaatcctggatgactgaaaaaaatatgtatctgcttttttgtacttattttattctaaatccacattagaaaaatgtttatgattttattctttttcaataaaaaaaaacaagtgaatatccacgaagtacctgactcttggctaggtgttgaggaggaaaagcaaacccatcaatgtctgtgcacttggaaataaccatctgggagaagagaagctcctttcaacctagggatgtctatagataagaatgaaattgcaccatagaaagaaagcatatcaacattgcctgctaccaacagatggcactgttaatggtttgtatcacaactgtatttgtgggaccaatagatttgctaacattctcagaaggtagtctggaaggagaagagcctctgttaaggcagtgaaatgatatacatgctcaattttgtttaattatcttgtcaaaattcctggaaaaaaataaaaaaatatatttatatgggatatttcgtttaattaaaatacatcatcttttaccaaaattaatatatgtgaaattaaattgtagtagaactttaaaacaacatagagttcctattgctttgaataattggtctttacatttagtattatattatatgttatattgttatgtataccatatatataatgttatattatatactgtaatattagagtagcaactgatactcacaaagctaaacaactcagttccactgaaatataccagattttgacttagttttaaaagggaggacctagaaacagagagaaaatgcatcagtgggtaaaatcatttacctctaatgttttatttcacctctatggtttttagtgtactagagagctgtttaatcagaccattaccaaattgaataaatggctacttagtgattactgaactatttagtgatggggttggggagaactccttttttaaaaataagccttttgaatagttcatataagaccatcctaataaataaaatggaacagaatgtgtttgccatgtaatagcttagtgatttttaatttctgtattgtgatgaaacaaccagcttttctagaatgtagccagtcctttgtttctcagaagctgtgcacacttgcggcattcagtcctagtgctgccataacagagtttctaaacactagttcagaaatgagacatttttgtttagtctctgtttgggcacagccaagagtttaagactgtacatggagagaaacttgcttttttctgtggatgtaatccaggggacctgttgaggtctttaatgggtggctgacaggatgaactgggcattcaatattaaagggtggtatcatagcaagggggttaccccagcagagtttgtagatcaggaattgtttagagcctagatcttgggaaagtgaacaagaagcatgttaactaaagataaaaaacagaaaccaggtattgtctttttaaactctgagctcttggagtggcgatcatgtcttttccatattagtatctccagtgatgagcattgtctgttggagacactcaatatacatttcttgaatagagtaaggatttactggactttgacacagaactaaggttctgtgtgatagaggtctgtgtgcttatgagaagctggactgtgtaggtgaggatgctaaggctcctgttcccatagagaagtccttgagatggctcaagctgctggttcccttttttcttggactttgcaggtattcaaggtgtctctagttagaagctttatgttttgtaatgggtaaaaatagtgctaaaatatatagctctttgctatttataccaaattgagggtctctcagaacaaatacagtggacggattttaataataatagctaatacttatatagggccaaatagttctgagtacttttcatgtatttaactcatttaatcctcccaaaagacttgtgaaagaagaaactctcgttgcccacttctagaggaggatattaggtgtagaaaagttaaacgatttgtccaaagttacatataaattaagtgcagaagctagtttttgaaagcttggctctagcatttgttttttaatcattaagccaaacatcaaattccccttcccacactttttttttcacttttaccaaagaaatatcttaacaaaatgactcctttggaggaggaatacatgcatatatatatctgtgtatacatgcatatatatatctatatatgtgtatacatgcatatatatatctgtgtgtgtatatatatatctgtgtatatatatatacatatatatatgtgtgtctgtgtgtgtatgtgtgtctgtgtttctgtgtgtatatgaggtcagagtgagggccaagaagctattttttctctaaagtggttcatatattgcaagtgatttaattgagggaagatatagttgtattagctaaaacacttaaaagtttataaataggtgtgtctacacaaaggcaaacattcctctaatttctaaacagtttttacttctattgaattgaatatgcctaatattttagtgtcctgatgattaaagtatgaggaatgaattaataaccaggttcaaatatgtgtattgttaccatgcagatctgttaatacttattaattcccacatcagtgtgaactaaggaaaatgaaattaagttgcattaagaatgtgctcagttatatataaagatttacttcctgtaagagtgattatataattatatggtttactaaaatagttatgagattttattctttcattcatttgacatgcattattggaatcttagtattttcaaactacgtatttggagataaatattgcagtctgaccataatgatagtttaggtattccttggcctggaaggaggacactagttcattttattaacatgttctttgtctgtggagagcctccacaatgccattttagtaaaatactggatctttactaaaccatggctaccaaagacaaagtgtcattctaggcagccaacagacttcttgccctactcctgacaagcaaaataaaatagcctggggtaagagaggtaatggccatgagttaagtcattttcatagttatgctaaatcagcttccctcaggagcacccccttcctttcctttctctgtttaaatgaggtggagtatgatgtgactattccagcacactcaaaattagatgtgtgatcaagtattgatcttcaggaagttcctaatcctgtctgatgttttctgtgttagctttttttttccttctgtcataatgttagattagccagcaccttcattttgttattcccttactttttaaggcaggattcttctgtacaagaaccctgaagcgaccctaatattgtatccaaaatgtagggtcagaatcaggagtggagactgtgagttcattgtgagttaacagtctattatttaaaagtgcaacaagaaaaatagttttgctttcattccatttctgggactctaattttttccaagggagtctggcataaagtatcgtattggtccaattgcttgggatccactgagattgttactagagagggctttggtgtaaaaccccagagtaaaattctttaatgtccttttgggtcattgaacactttctaccattatgcttgacatggacaccattgaaatcattccaaggtcaaggtcactcagcaattttactaatgcttcaagttagtggaattttatttttccccccataatgcttgttttacaaaataaaatacagtatattttagtagatattgtaagatcaatttttgaaatttcttttatcaaaataaatataaattttatgaagtatctgtatgtttattatatgtaaacgtgcaattacaaatatgaaatataatttatatacatgtatctatgcatgcacctggatcttatttgaggtataaaacatgaaactagaactaatgtgttttacaaatatacgtaaaaagttattatttttttaattttatagaaacacagagtaagtaatgataaaaattcatttgtattaaaaatatttttataactacaattagtactaacattttgctttagcctaagcttaaatgctttatttgctagagtcacttgttaaaatactaaaaattttacaaggtatgaaggtaaaatagaaattatttcaaaaaaacaaaaatgcatgctgaattttctcttttcctttataaaacaagcaagtcctttatgtagatttctacaattcataattcaatgtcattaaatggcattcaatttatattttagactattatgatttcaatttgagacacaattgttttccaaatgaattcaatgtggggtatatttatgtaatagatgaaatgtatttcatctattttggaattgaataaattcaatttattcaattgtttggaattgaataaatacagtacgtataaagggaggatgaaaatgtacaactattggatgttgatagaagcattctgaataagaagcatttttacaataaactcaagtatatttttataatgtactttttaataatacactgattttaaaagtcttttttataatgtactttcatatattttttcttgagaaatcttgatcttgtattgacaattgcataaatatatttgtgcccagcacaatggcttacgcctgtaatcctagcactttgggaagctgaagagggagaattgcttagtccaggagttctagaccagcctgggcactgtggtgagaccctgtttctacaaaaaagtcttttaaaaattagctgggtgtgatggcacatgcttgtagtcccagctactcaggaggctgaggtgggagaattgctgaggattgtttgagttcaggaggtcaatgatgcagtgagctatgatcacgccactacactcaagccttacaacagagaaagaccttgtctcaaacaaaacaaaacaaaacaaaacaaaacaaaacaaaaataaataaatatcttggtatgtaagggcaatttggggttgataatttggagagggatggaaagatacatagatgcctatatctacatagatagagctctctctatacatacggatacagatataaatagatatctatatgcagatagatatatatctatgaaaatacacatctaaataaccatagatatctattaatatctatgtatctgtatctatctatacattttaacttaaaactttatatacacataagcctatagttctatatttgtagctaagtttaaaaagctattcaagggaagccctgagttgttcttttatggcatctggtggcatttcatatttgacgtgttggttgctattggtgtttgcactggtgaatccttccactggaaatttcatttcttcagggtttaccaatcacctaaaatgttttctttctggataatatcccctgactgctttcttcctcttttagcctaaagtttcctaaaaatttaaaatgcattgtagtcagctttacttacctttcacagaatagcaactcaagaagtgtatgctaagaggaggaataaaattatgtaaaaaatgaactagaaacatagttacctaagacaaaaataataagtggacaaaccaagagtaaacattttacttaagggtttaaaaatgatatcaatttttactagttagggacaatgaataatgcttatcacctccactgttatttagtgttgttctggatgatataacccatgtgtaatgacagaaaaaagaattatggctgttgaaaaggaatagatgaaatttccagaaaataagtttatacctaaaaaagccatcaaaacctattataaataacagaagtacaataagatggttagctataaataaatacataaaaataaatattttttccataattcagcaataacaaatctgaaaatgatctgattcttaatatcaattaaatatataataagtactatagcttaacaagaaatgtgcaggatctatttaaggaaaagagaaaagaagaacttataataatcattttaatacaaaagagtgaattagttgataggtagctaaaagcagaattttaaaaatttactaaaaaaagcaattttgtaagtaaatttgtaagtaagaaagaaaactggaatatatccctatctcactttacatgtcaaaataaattacaaattttatatttaatactttattttttccagaaaattaaatataaaaatacagaaaatgaacagaaaaaatataagtaagttacaaattctgggctaggaagcccaattataaaaagcaaaggaagacgccattattgaaaacatttagattttaaaacaaaaataaaccccctttttacatttaaaaataacatttaaaagtcaattgttaaaaaaaagtaaatgactttaacaagtgacagacaaagaaaccatacccttaatgtggaaaaaacgcttacagatcaataataaggatgcacaaatgacaaaaaagtatccaaatgaagaactacgatgaaagttcaaaatcactattcatcttgtaaatacaaattaaaactagaataagatttcattttaaatctatcgaatactagttggcgtctttcagaaatgccaggccaaactattcctgatgctagaaatgttttgcctgacagtggctgaaaactatttataacatatggaaaggaaattacacaacttgagaaatttcttgcagtgaactcagaaatgaaaaggcggttagatgacaatttcagttcattaatttataaattcacatgctaccacagattttagagatcatgcaattcagtatctccatttaagagtaggaatctatgggctattctgctcaggaaatcagcactatagcatgtatatgtatttcataaagtatctggtggatattactttcttgttttgtttttttttttttttttttatcatttggaggttgtaaagcatgatcagtccttataagggtcacatttagacagctacagattttaatcgttccaaggaaggaatgggggattatttcaaaagacgaaagaaaacattctttgatctaaaagcagaaccaccatttgacccagcaatcccattactgggtatatacccagaagaatataaatcattctaccctaaggacacatgctcgcgggtgttcattgcagcactatttacaatagcaaagacatagaatcaacctaaatgcccatcaatgacagactagataaagaaaatgtggtacatatacagcatgagataccatgcaaacatgaaaaaaaacaagatcatgtcttttgcaggaacatagagctggaggccattaccgttagcaaactaatgcaggaacagaaatctaaatactgcacattctcacttataagtgggagttaaataatgagaactcatgaacacaaaggaacaacagacactggggtctatctgagggtgaagggaggcagaagggagaggagcagaaaagataattattgggtattaggcttaattcttgtataatgaaatcatctgttcattgaacccccgtgacacaaattcatgtatgtaacaaaccttcacatgtaccccacaacctaaaataaaagtttttataaaacacatttctttgttttatacagaccagaatgaaatcatttctcaacacttcttttacattaaagcacattattcttgtttttttcctcaggtattgccctactttttaatcctaatctatagttccattgtaatttttagaatgctaatctaatatttattgaattcttttgtagtaagcaactgaaaaaaatttaattttcaaaaggaagaaaaaatacatgtttaaataataagataacacaactttggtattctaaggaatgtttggggattcattccagggcgctcatattttcaggttagctttcaactgttattttgtcgagtataatcaatggagattttgttattcatgtatttatagagctggttagccataaatagtttatgaatggagacatttctagcaccacctaatggcagtcaagtaaaaagaaaaagtttttctaatttaggaactgttttgcataatttaaattaaactatatagccagagttacttccatatgaaaatgaacttttacattccctaatgcactaactaggcatggaaatccatctctgagcaattggattgagtaggaatgaagctgaagggatatttgataatgaaaccaaggggtttctgctgtctttatgtgtgcaagaataagaaaatacctagctaatagaataaattaattttatgtgaaaattttctttttagtttcagaagcctatgcatactagattttccatactgtagtttcctgaaaaaagtatattttgagtattgtattggcatattttatttgtcttgtttttcagcagttatttatacatctttgaccaatttattctactagtttaataaagcgttttttaaagtttctgatagtttttttaaactgagtcatatcattctgattataatattggaattttctgttgaatatgagtcaaagaacatgctttagatccgtaagctctactcatttatttcatgtgtttcctagcaggatttgaagaatgtgttgtctgtcataaccctaggattgagatcaatggatttggttaatgtatccgaaggagaaggagaacttagcgatagcagcagattctgacacctttcatcctcgtctcaacactttggtttgatactttcttctatgatataaacagggaatactaggcagactgcagatacaggtagttttttgtttgtttatttgtttgtttgtttttgagatggagtctcactcagtcacccaggctagagtgcagtggcacgatctcggctcactgcaacctccaacctccgcctccaggattcaagtgtttaccttgccgcaacctcctgagtagctgggattacaagtgtgccaacgagcccaactaatttttgtatttttggtagagatggggtttcaccatgttggctaggctagtctcaaactcctgacctaaagtgatccgcttgccttgacctcccaaagtgctgggattacaggcgtgagccaccatgcccggccagatacaggtagttataaaaatcaacaagaaagagacagtctggtggtggtagtagtttcaagaaagtgctttctcttcgactgcaatttcttcctttctatgaacatttatttattgatgccctgtaatgcccttcacttctttgtgcacacactgaattttaattcagtcttcacagtcctgcttaaccatcacagcttctgtgaactttttctgtatatcattttgctctcatttcaacaaaattaatcacttttgctattttatagctgtagattacatatccctcttgtactgggtctttataatattttgtactcatttggatacaaatacttctactgctataggatgggtttcccttaaagtaagtattatgcctttcttgtttatctttattattcagagcaaacatgtattttggtgaaagcaaaggcaagttaatggaactgatgtatctttaagttattgtctactgtttattttctctagttttatgttttaatgtaggctgatgttttcatttcttcctttcattaatccatttctttattactgctaaaagttaactagtatttgttgttagttttttgttttcttttgttttagagacagggtctcactatgtcactatcttgcccaggctgtactcaaactccttggttcaagccatcctcctgccttggactcccaaatagctgagactataggcatatgacactgtgcctggctgggtttttgttttgttttgttttgttttgtttttgttatttttaacatcatatgatacttgattgacttttctaaacccgtggattaatatctgcttctaaagtaaaaaattgttaaccttgttattgaaagctagaaagagaaaatgtctggcttaaaggctatcctaaatttttgaaaaattcttatgagaatataatcatctatataaagggtacatttggaaaatacaggtatatctttaagaaagattcagaatttacaagaaaaaatattgaatatgaagatgattagacaattgaacaaatatgtagataaatacatcaatttttacaaaacatgaaatagcattaaaaagagaagaatttatcactgctatcacttatcactgttgcagaggtccgattaatgcagtaagaaataggagtttaaaagttggacataaattgatcagataattattattttctgataatatttcctgtaaaatccaagataatccactgaaaatatagaaccagttgaacaatctacaaattgactggagtcaagagaaatatatataaaacagttgcattcctgttctcacaaaattactcataaaataattagaaacttctgtttcaaattgggatgtagaacagtaagaaagaacttcgctttcatggtaacaacaagaaaaccagactaaagaaatatctttttctatgagtctgtcaaggagcaagcaatgcagaaaaccctggctgaattgaattttaggaagaaataagtgcttcataggtgatcagagtgctgtggcagcttccatatctgaggctaaacacttgttcagacagcggaggagtatgctattgtagatggggagaatttttaaggtcaaggggaaaccatccacccttagacaacaatgtagcctagtaagatgaaattagatctaaaagtctaaatgccaaagcaagtagctcagccccaggttacactattatcctccacacttgaattttgctaagataaagtcagttgaagaggccctagaagtggattcctatgaaattttgccatgattggattccagaattatgaataaatttaatccaaatatgagccaaaaatatttatagtcccagccaagtcccccgctagctcaaatgaggataagatccaaaaggtggcatcaccaatggttgaaggttgagctaaacacaagtgaactaaatacaattaaagcccaacttcagttctacataagtcagtagaaatgtatccacagattgccaaattactgtaattagaaagcaaagaatttaaagcaaatattgtaaacatttaaaaaaaattaaaggtaaaattcatataatggatgaaaagataaaatattttaagagataaatgatagctctaagaagaaataaaatggaaattctagatctgaaaagtataaatttacaataaaaactttattggataagtataatagcaaattggtcagtgcagaataaaagattaatgaatttaaacacatatcattatgaagtaaccaaagaaaaatgaagagaaaaataggttaaaaaataaacagatcgataacatgtggaataatatcaggagatttaacatacatggagatgtgggttccaggaagaagaaataggcagaaaaatatttgaagaaataactgttgctaaatattcaaatttgatgatgaaacaacctaaaaatgcaagaagctcaatgaattccaagtagaataagtataatatagccacatattgtatactcacagtccgattactaaaaaaaaaagattatggaaataaaaaccttaaaatcagctagagaaaaggaaaaaggcactacatagaagaaaacaatgaaatgaatgaaggctaacatttcatcaaaaataattgaggctagaagataatacaatatctttagaaactttaaaacaccaatctcaattctatattcagtgaacgtattattcaaaaataatttgaaagacatttttagattaaagaaagagttagtatatcatgaatagtcttgcattacaagaagtgctaaaaaaagttttaggctaaaaataccaataataactcaagtgtgaggaaaaaatgaaggaaaatggaaattaaaaatgtgaataaacagaaaatattattaaaaactcttttgaagacatttgattagtgaaaacaagaaattttaaacatattctgcagtttacaacatatataaaattaaactgtataaaaaatagtacaaataattggacaatggtaaatggaagtatgttgctgtaaggatcttatatgtgaagtagtataatgttaatttgtgatagtatgtgtgttaagaatgcatatgatgatccttagagagccattttaaaaagtctaaagtctacctagggagatgaaaaaggtagcaaaatggaatgttaaggtaactcctctaatccataacaaggtagggaaggcacagcaaagaagcaaacagcaaatgcaaaaaaaaaaaagaagaagaaagtaagaaaagagagaattcaaatagcaagatggtaaaattaagttaaaaacatattaataattatgttgaatataaatgcacataacacaacaatcaaaaagaatagattattaaactggctaaataagcaagacttacaaagggtgtacaagaaacacacttcaagtataaaaacataaaaagcttaaaagtaaaaggatggaaaaaataaaccatgaaacatttatcataagaaaatggtagtggcaatatttatatcagccaaaattacctttaagaccagtaatattactaaacagacattttataatgatagtcaattgattaagaagaaattatcctaaatgtgcttatatgtagtaatagagtttcaaaatacataaagcagaagtttacaaaccaaaggacaaaatagacaaattcccttctatatttcaagatttttaaatgactttcttagtacttaataaaagaagttgataaaaatctataaaaatacagaaaaatcaaacacactatcaacaaacttcagtgacagttattgtacattctatacaaaactggaaaatagctattgtttttcaaatgtacatggaaagtatgtatatttgaaagtatgtacactacaaacattctacagctaatatgctgggccataaaagaatcttaatatatttaaaaagttgaagtcagaatatattctctgtttatatagaattaaattagaaatcagtctgaaaatgctatctggaaattttctaaatacttcaaattaaacaacacatttctaaatgccctaccaattaaggggaattttttaacaaaaaataaagtataacatgaactttttggaatgcaccccaagtaaggcctggagagaaatgtataggttaaatggttatcttagaagaaaaaagtccaagctttcctaagcttcttcttaaaacaggcaaaaaagaacaaattaagaccaaagtaataagaaatgaaaaaaattaaggcagaattggatatcaatgaaatggaaacagaaagcaaagcccagaattgatttgcaagaattatgggtgttggggaatggagagtggtaaggggagagaaggaggggggagagagaaaaggagaggaagagagagaaaaaaatattttggattaattttaaaaatctatcgatatgatttaccacattaatagaggaaatagtatagcaaaatatcatattatctcaatacagctgaaagacatttcacaaaattttatacctattcataatgaaaactttcagcaaactaagaataggagagatgaaggaccactacaaatattctacagaatacatatacatatatatatatatagtatacatatatgaaatgtacactacaaatattctacagctaatatgctgggccgtaaaacaggcaaaatatatatacaatatatatttaatatatatttattatatatacttatacatacttaatatacttatatatttatatatataaatatataaaagtgaaatagtgcatgttttgattttaagatagggatcaagttttcgttcaaactttaccagtagttctagccactgctaaaacaatacgataatataaaagtcataaatatagaaaaggaaaagaaaatgtatttgtcatcgacataattttgtatgtaaatgctttaaaaaatctttgaaaaagtgttaaaactaataaatgaacttggaaagattgcagaatacaatgttaatataaacaaaattaattgaacatactagcaataaacaatttaaacaaagttggatttaaaagaatattcaaaacatagcacttaaatttaacaaaataaatgaaaatatttgtatagccaaagctataaaacataacttagaaaaatcaatgtaaacctaaatagatgaagatttatcatgtttgtggatgaaaaacaaaatattgttaaaatagccattttcctgaagtcaatttattcatttaatgtaattccaatcaaaattccagcaagcttttttgaagaaattcccaagttgattctacaagttgaaagacctagaatatccaaaatactattgaataaagtattaaaaaaatggcaaactgagccatcttatttcaagatttaaaataaagccataataattaagacttcatagtatttgtactggcaaattaatcagaaatagactcagacttccaatgtcaattaaaatttgatagaggtaaggcagttcaatggggcgagtacaatcttttcaacaaatagtactgtatagtgtataggagtcaaaaaaaaacaataaagcttgacccctatctcacatcatgcatacaatttaatttgagatgggttcatagacctaataaataaaagctgaaattataaagcttctagaagataaatgagaaaatatcttgatcatcttggtgttggtaaagatttctcagacaaggtacaaacaaagcgctaaccattaaaaaatggtaaattcaacttcatctaaaatattaagaaaatgattgccattctaactgatgtgagatggtatctcattatggttttgatttgcatttctctgatggccagtgatgaagagcattttttcatgtgtctgttggctgcataaatgtcttcttttgagaagtatgtgttcatatccttcgcccactttttgatggggttgtttgtttctttcttgtaaatttgtttgattctggatattagccctttgtcagatgagtagattgcaaaaaatttctcccattctgtaggttgcctgttcactctgatggtagtttcttttgctgtgcagaagctctttagtttaattagatcccatttgtcaattttggcttttgttgccattgctttttgtgttttagacatgaagtccttgcccatgcctatgtcctgaatggtattgcctaggttttcttctagggtttttatgcttttaggtctaacatttaagtctttaatccatcttgaattaatttttgtataaggtgtaaggaagggatccagtttcagctttctacatatggctagccagttttcccagcaccatttatttaatagtgaatcctttccccatttcttattttcgtcaggtttgtcaaagatcagatggttgtacatatgtggcattatttctgaaggctctgttctgttccattggtctatgtccaacaatgacagactggattaagaaaatgtggtgcatatacaccatgaaatactatgcagccataaaaaatgatgagttcatgtcctttgtagggacatggatgaagctggaaaccatcattctcagcaaactatcgcaaggacaaaaaaccaaacaccgcatgttctcactcataggtgggaattgaacaatgagaacacatggacacaggaaggggaacatcacacaccagggcctgttgtggggtggggggaggagggagggaaagcatttggagatatacctaatgtaaatgatgagttaatgggtgcagcacaccaacatgacacatatatgcatatgtaacaaacctgcacgttgtgcacatgtaccctaaaacttaaagtataaaaaaaaagaatcaaaactttaaattaaaaaaaaaatgaaaaggtaagtcaaagactggattcggctaggtatatgtttaacttagagaatgccaagcagttttccaaaatgattgtttaattttgcctttacattagcatgtatgagagtttccattgcatcacctattcagcagattttggtgtttttaatttgaccaattctagtgagtatggagatgtgtctcattgtagttttaatttgcagttcctggatgaatgatgacactgaacatctttctcatgagcaaatatggttatttgcatatcagaatttttagtcaagtgattgtttagacgttttgctcattttctattgggttgcttggctttttattgagttgtaggatttttttatgtattctacatgtccattgtaagaatttaaatttctgataaaagattaaaaaaatctatagtaactttttagcagctttttcattcatactagggacttgtattacaggttccttctcttgatttggattttggaaggcaaaattttcatcagctgaaatgtattagttcttgatttctttttgttcttacaatagctttgtatggctattacttgacaatttccaatcattttgaaatgtcttacattttcctgtatctgcaataacaaagttaagttgacagggataaaggcttttggatggctttttatgtttcttagttcaagagagacacatttggtttttgaaaaatgtttgtgttgaagtctaacatacatacagaaaagtgcaaaaagtagcagtgtgcaggttgacccatttttataacccggatagccttgtgtacccagcacccacagtacaaaatagaacactactgggcccccagtgggcctgccttgtgccctttctaaatcccagccaggattacctctatccagacttctaacatcatacgtggatttttgtctagttttgaacttgatataaatgggatcatacagtatatattcctgtgtacttagtatctcttacacaatccatgtttgtgagattcatgtatatagttgttcattctcattgctatatctgttgtttgtacagttgagtgacacgtgtgtatgtttcagtttgaaggtgtaatgaaaggtcttgctgtaaacatacttgtatatcttgtgaccctatgcatttgggtggggctggatgtagatccaggagtagaacggctggatgaaaacatacatatatcaaaagatacaagggtaacttttttgtttgtttttgagacggaatctcgttctgtcgcccaggctggagtgcagtggcgcgatctccactcactgcaagctccgcctttcgggttcacaccattctcctggctcagcctcccgagtagctgggactacaggcgcccgccacgacgcccggctaatttttttgtacttttagtagagacgaggtttcgccgtgttatccaggatggtctcggtctcctgacctcgtgatccgcctgcctcggcctcccaaagtgctgggattacaggcgtgagccactgtgcccggcccacaagtataacttaataaatactgtcagtttttaaaagaggttgtacgctccaactagtagtttatgaatgttgcatgtatagatattattacattatatattataaatttaacattttactttttaatttaatattatatataaaaatatatgtaatatatacgtgtgtgtatgtgtacatacacacatatacagtagttgcacatatttggctacactttgtgtttccttttcattttagccattctaatggatatttagtggtattgcatttcattttgcatttctcagatgactaatgataccgaccatctttttcatattttttttttctggctatgtatcttggtatcagatatatgtattgcaaatatctgctttcactatgtcatttgtcttttcattctcttattcataccttttgatagccaaaagttgttaattctaacatggtctaatttatcaacttttccctttatgttatagcttcacatttatcgtttaagaattctttgcctaatccatggccccgaacgtgtatgatttttatgattaaattttaaagttgtaaacctcttacttgaaagttaaatatttccatgtagaacttggatttttcatatttttagaatgttaggccatggatgtaagtttattttacacatctcatgtataccatttgtacaaagtatgtgttccttaaatatttcctgaatgaatgaatatagagatgcatgaaatgctctattgtttaaacactagaaaccaaaacactgaactttagaacatttcctgtctcattttttgaaaatcaaagtctaaatttcagaaagtgagaaaagtataattttcacttgtctgcccattttagtcagtgtttcagcttaacacaaacattaaaagcaaaaatattttggcactgctgggctctgatccacagctcttcttattcctgggcccaggatgataacacattcatgaggcagaggggaagacaagttcaactacacagctgtattaaaatttctgctctcctgcgcacaccgcatgtccactttcatttctttggccaacacaagtcacatcactaagcctaagtcaatagttgggaatctgtaaatacataatcttcttataggaaaagagagtgttaataattttgaatagttatgcatgttaccattctgtctcacggtagagtcagtaatgttttctttaaaatgttttatatgttaatcaaaatattatgtttatatttaaatgtattcttttttatttagttcatttaaagaattgattacatgatttcagcatttggctcaaaagatagaatttatctatatctatggcaataattaattgtcaagaatatgtttcagtgaacgtgtgcatttttaattttgtcatagattttgcacaaaagacattcattatttattttggcagtgtaaagagaaaaatgagaagattaaattatttggaaaatgctgtgggaaagtctcacatacaccatcaattccaattgcctttttttatactatagcttcccttcttaagaaattttccttgatctgtgtaaaatattatattttagttgcactagcagtgcattttctcatataagcataaaacttgaaaattaaataatatattttagaaaaacacacgaacttgcatatttcttaaatagtgcataatttttatgagattcccacgtatatcttgtctaaatattcctgtaattcttactgatttattttcattcatcagatttctcttgaattaaagacaagtagttgtcttcccagattgagcaattattgatatcttccaacacccaattccttgtttttattctcctctctactgccacatagatgactccaacacactggtagagagttttgctctcttcatgttccaaattatagcatttttgtgaaataacctcaagctgagtaattttataggaataggttttattataatatatgataccaaatatcacataaaaagtggtgacagaaagataagatttctcaagtagtgttactctgaaccataaggagagaagcttaagagaagaaaagagttggtagaaatataattgttctctgctcaggttgtagaccagactctacgtctatgtttctgctggtagatgcttccttttatctccctggtctaccctgataattaatttatatgtctcccatttctttctctatcagatttttctaattcgtgttctgtacccaccttctactcattcatttcctcagtccttatcacccagcagtcaagagtctgtccattctacttaactgaaaaagattatgtcattaccagctccgtaagtttttcttcagttctaattattctggacctattggaagtgtttacacagttaactaaccttgcctccttaaagttccctcctatctagatttccattttacaatattatcttgatctaactttattcttgcccttgtttttttcttttctgaaatgtggacatttccattaaaggctcttgttctttttctacaatctgtctcttagacatggcttttgataggtgattgccaatgtattttcctagcatcgtcttctcttctaagatttagtttctcatttccaaatggcaggcagagttttctgcatcataagttcagtatgcctaaaactaaagataattcctaaccccagatttccttccttatctgacatttctatttctgttattaatgccccattttcctcaataattggtgaaaagaatggaccattttgccccacaccatcacctcatatcaatatgtcttaatgtgcctttcctggtatgtatagagtttatcctttcaattactaattcagttacttgtctgtccttgtcttattctcccaaagcacagcactcacctcttttctgtgtagctaagttacgtctcctccctacatttcatcatgaattttgttgccttagtctcaattttgaaaatcctattcctgctctccactcaaattttaatttcttccattaatttatgggatatgtttcaaatgggtggctcaatcatttcagtgcacttaataggggagatgagagagaacaatacatctagtagcaggagtccaagtgtgtttgactactgaaaagcaatttgttggggcaaacaattctattctgtggagtggaagagttgccaggaaggactgcatcctgaatctgacagcaagaacacaacattcaagcaggccagagtaagagaagaagagagtgtgtaacaatgagaaataaaaatcactaggacaagtttgttgaaaatgaccaagagcataaaacgtagaagatggagatgcagaagtcaagaaggccaggataaatttgatttgccttcttggaaagtctaaagcttgtatcctaaacttaacctttgctgtgactaaaggaatagcactctaaaaatgacttagaacacagcattctttttcatctttgtcttctatacaaacttctcaagccagattgtacagatgtggtctcacctatttctccagatttatctaactgtctccctcacaaccagccttcctcaaactttccatacctctaggactttgtacaattcccgccaaatccttcatattctctaaaaacaagctgaagtactatattatctaaaactgtcctcaatttcttttaatcaggtattttgtatacatccctataccatttatcacattgcattacatttttttaattgtcttttttctcaactagaactcaatgtcagttatgggcttattagtttttcttctttgctgtgtatcggagtactattcaacaaatgttagtgttccatagatgtatgttgaaaaaacgacagtccaatgttcaccaaatgatatctgctttcctgccttcaaatcctagctaaagtttttctcttcagacatggcttctggagtagttgctgtctattgaaactgagttaaccaccacccacctatgtagggcttttggttaccagcccagcctgaaggaagatctccttcctttaaatttttattatcctgcctgactgtatttttactcaaatcagtattcattcattattcactattgtgttcttgagatgttatttgattttcatatatggtcttgagctcttatttgattccacaggataatttgttaagacatatacatttaatattttcaactaaactggaaattccttgaaaacagagattgtgtctcttaccagttttaatgcattaagcaaaaagccttatacagggcaagagctccacagtatgtgttgagtacgtgggatactgagtagagtggagatggggccatgtaatggtaggactggagatggggccatgtaatggtagggggaaggcatcattcataggactggagatggggccatgtaacggtagggggaaggcatcattcataggactggagatggggccatgtaatggtagggcgaaggcatcattcatagggctggagatggggacatgtaaaggtaggggggaggcatcattcataggactggagatggggccatgtaatggtaggggggtgacatcattcatagggctggagatggggacatgtaatggtagggagaaggcatcattcatagggctgttgcatattgcccctgcttcctaagctgtggaaatttctatgagaaaagagcattgtatatcctatgatatgcagggctagtatgtgctctgaagggtcagtaaagatcccaaaattctgaaggctgcaaaccatttggttatagggtggtgtttcaggaaattacctctataggcctcttcatggcaggtctttccaatattaacttctattactgaaccgattctttaaacttcataaatattttaagcaagaccctctgtgtttctttcactcttgtcaaaaacccatttatttttatgactctctgataatgttttcacattgatactctgagtatccaattttgggttgacaatatgtctttttgggttgatgagttttgcataaatttaaacttcattatatattgattagcaggaatgtgggcataagattccaagtactgaatggcatttaaaatgggatatatttaaaaccaaatggcctagaccatgcgagtatattgctgtgtataatttcctgactgtactcactacatcataaataataatgaaagtaaatgtacatttatcagaaagaatcaacaaaaccccagcactgatttgctgatcacacttgtcttaccaggcattaaggccagctttcgaacaaaagtgcctgaaggtttgattgtctttgcagcatcacctggcaatcaggaagagtattttgcacttcagttgaagaagggacgtctttattttctttttgatcctcaggtaaatgagaaatcataaactttaatatttttaagaatttagtaggtgcctggtactgaggtaaatgcttctgttttcacactgaatcttcattcaaaccttgtaaggtaagtactattattatccccattttgccaatcaagaaaatgaaacttacaaaagtaatgtgacttgccctcagctaaaatagcggagctaacttttaaaccatcatggtctgactgagaatctgtgggcttaacaaccaaaatgccaccttataatgaagattaaaacttttaaataaatttaaagagatctatttttatttttcttagtagcaaaaaatcatgtccccttttcttccttccctgtctttcttttttcattgtttcaccagcaaatatttaagtggctatcgggtactatggtactgggcgttgcagactaccatagtttcaaagttaaatatgaccatgcccctgcaaaggatacagtaaaataatcaatttaaaattcttataaattgtatcaaaataaagatttaggattctatgtattataggaacataaaataaagaaataaattgttttctgagttgtcaattttctctggaaatgtgatatttaactgagatacaaatcaatgaagaaaagttggtcaggacaagattatatgtctgtatttgagggtgtatatttcaggtggggcagtacaggggagattctgatctccacctgggaaggtgctgagcataaagtttccaggcaaagtgagcagcaaatattaaggaaatagcaaatattaagtgcctgaggtggacgagaacatggcacattcagtacactgagatgaatctcttatggctgggaacagagacaaagggaaaggtggtagattgaaaagctgggtagaaaccaagtcatttaagaccttgtaagcaaatgtgaggatatgaatttttcctaagggcagtgagaaagcactgaacagttgtcttcacttgagttgaacaaatatcagtgagcatttgatattaggtattgtattaagcatgtgagatgagtaagagaaatgagtaagactaagtaaaatatattagctttccattttctcagttcttcaacttaaaactgatgatctaaatcacacgttatgcttgacaaataaatgttttacattttattggtaaagcagacacaacgttcaccctctgtatccaagttgcgtctaggatcatggactgagtgatctgactgaggatctcagcctcatgaaccctggagatccattgaccttagagagaaaaggcagggcctattgtaccaagtgtatctgaggaccctgccagactcaaaaagcaggccaaagtcctcctgctttatgaagctgggagagccgcacagtggccactcgaaggaccagggacagaaaggctccctcctcatgacttgacagggctctgctaactccctggctggtgcacagcaggtcctcagacacaaagatttctgagcgtcccctagtaatgcagcttcttaaaggatgccagcaggtgggcagtgagtaagcaaaaggaaatagcatcacacctaagcagatcctgcagccagagggaaaggaagaagcagcagctatcgcagaaggcaagacagatggcaactgaaaaaaatttttaaaaaatcagctgaagttgattcaattacataatggaagatattattttttatttgaaaactttaagtagattaattagaggagagacactgagcctcagattagtaggtcagaagattaagttgaagaaatctctcaaaatacataaaaatgtgacaaaaacaagaaagttagatactactactgtcactaagaagcgaatcggaaggagaacaaaaagcacatgctcaagaaaaagagggataacataaaatgatgaaacaaaaaataggagagaatatctgatttaagagggaatttagtataaatccattgaaaagactcatcaatttcctgtcaagattaagcaaaactaatacttctatgagacctctttgtgccaggcattattctaagtggtctctctatacatcagtttgtacacttacatacacacatatgcctatacacacacacacacacacacacacctacacacgcacataaactcatttgaacttttcaacaactctgtgaggtagatactcttcatattcccattttacaggtgaggaatctgggccacaggtaagttaattttccccaagtcacaacactaataagtgaccaagccaggttataaacacaagcaattgagctccaaagaccatgattttagctacagtgctatactgcttttcaacatgaaagaaagatggttgttgatatccataaattcagaaaaaaaaaatccatctctgcaccaggttggaaagaaatatttcagtaagtaatctagccaaaaggaaaaataacagagtcagaaatataaaaagaagaagcatcagtgaataataaatctagtaatattaagttatgcctaaatatttaatgatagagtgactagaactctgttttacagtgccaaatgagaatctttgaaatagaagagaagtatagcaaaggcaagaaaaaaaacgtgaataatcatttgttgctaaaattagtaagatttgaaggagaggaaagatgagtgaattaaaagttctgaagataccagcttagtggcggggtgtgggtggaataagggaatagattatactgacgttttgttttcgttaaataaatagggcaaatgtttgatttcaaatgttatagaaaaataagttactactaataaaaagtgctcttcaggacatccaaattaacaaggttaaaaaggacagcaaatgctaagttaaaaaatcaacaaaaatcagaaaaagaaaggggagagtacagtaaaatagaagactgtcaatgagaaagaaaaatctggctctgctttttccccttcaacctgttagtatctggagatatttaagaagaagccagatggaaaaaaaactaatcacaggaccacttgtttatagagctttaaagtatacaaagtgagttcctgttaatgatctcatttcattcttgaagtagccccttgaggttgattttgttttcatccctgctttagatgaagtggcttaactacggtcatagagtggtttagggatagaactagcactgaattcaattatttgaatagcactgaattattttattcaatgaaactttgctaagaatttattggacttcacagttatgcactgggaacacagaaatgaacagaatgacactcattggaattctggccattggttgttcatcacagattttgagtatttatagccacccccctaccaaacatgggacagtcattggagaattaatccaaaaatgatttccccaagtctgaagcatgactgccatctcttttgacatgtggtgttgctatttctaaaggatgcgataccttaagactctgtaggataggagggtaaaggggtcaaactgcttaacggagaatggctgccaggaaactcatctggcaggtctagttgttttcatatcctttacggtgatcacctggacaggctggtgcaaagcgtggtaacagaattcagggaaacattcacagggcatttgcccatcatttccgcccccttacccttctcattcacacaattgcttagagtactcgtcactgctattagttttcccagttgctctgtccctaccctgtatagccaaaccctaagctgtatacatagtccgcaggtgccagccaagtattaataaaattgttaaagccactgggcgtggtggctcatgcctgtaatcctagcactttgggaggctgaggcgggtggatcacaaggtcaggagttcaagaccagcctggctaagatggtgaaaccccgtttctactaaaaatacaaaacttagctgggcgtggtggcaggtgcctgtaatccccgctactcgggagactgaggcagagaattgcttgaacccgggaggcagaggttacagtgagccgagactgagccactgcactccaacctgggtgacagagtgagaccttgtctcaaaaaaaaaaaaattgttaaagccaagttgggggctaaagggagtgaggaaggtttaatgatgtctagtaagtaaatttttatctgaaataatctctctccataaggtaaaactgcttgagttttcaggaaagtgacaattattttttaaaatacaagatatgggttgagcaggatggccttaggatctagctgagaaaatgtaatcagatgcattacactatgtgctcacgggccatgaggctctctatatatgaaacaacgagcttatgctagcaaggactgtgtccttccttacttccaatgaatttatactctaaaacaggtactaaacatattttctaaatttataatgaaagccccactcatttttagacaaagaagtgttaaaactgagggatggtgaaaattttgaatactcttctcttatttgctctctttttccaaagtaatatcaatgcagcttcttgtatgaagttagagctactctgggttttaaaaagtatagaagtttatttcatatgccttctattggcattacatttatttatattttaaatactttgggtaccactttaagtcagtttttctcctttaatctttaaatgcggacgagattatctagtgaatactttttatactcatcacacaagtaattatgtacttagtgtgtctgtcttatcagactgtatgatccagtgagggcaaagtctatgaatcttttgcccacaggtacttcctcaggacttagaacagtctttggaacatagtagatgcccagtaaataaatgaccattgacatattacctggctgattgactcaataactgttggtaggatactactactcataactgaagaaaattatccatttttctggcttacaacgtctagctttgtaatgattacacagatattttgtgatgtttgttttatttttttttattttgaaaaaattagagaaaaagtcttgctgttttgctcaggttggtcccgaactcctggcctcaagcaatcctcccaccttggcctctcaaagtgctaggattacagacatgagacaccatgcccagccttgttcaaatttgtctgtttttcagataatttgatttttatcaggaaaaaacgagatgcttatttttaaattgtttttactgaattcattcaaaatagccaaattttgaattatgaagagaatttcaaggaattttaaagtagttatctagcacatatttataaaataacttgaagtcattgtgtactttgctctttttaaaatatcttaataaaattgagtattaaattccttacaaaacaatttaatacaacgtagaggctatagatataaaaatgtatttggtttgtcatccaactatccgaagcattctattgaataaatgtttagggaaagggagattcttcatagtacataaaattggaaatgtgtttgtatattacaaactgggcacttgccattgttaaaagatacaataaagaaaagttaactgcaacttttaattacagtttttattgttatctccaacaattttctataattttcccattcttcacttaattaaattcaattttgaatatacttgatcagataatattttagtgaccagtaatgatctatgtttatcccttaaatattctatgttcagtgacattaacaggaaattcacatcatattctgggcttacttggaaggaagctgtgaaaatgaaagctttaaaacaattctgaatagcatctattgaatgtgtctgatatgttccaaatagaaagaacaacatgcataatatgacaccagaagtcatcacagaattgttctttcaacattgatggggggaagtaatcttaaaatagtcttcaaaaaatgatattctaaattgctgtaagtataaagtgagtttgtcatgctgaggctgtaggtaatgtacttgaatttgtctccaataaacttgatttctgatgtagagaactattaatgcttcagattgttgccaaacaaaatatgaagaaccacttattcagacacctgatctttagaatgcagcatcgtttgtaacaattttaacgctaactaagtacactttgatgagacagcatttaataaaatgctcattaatttcatcattagcaagggtatgctaagaagtaagccagtttcttatgtcacgcccaattagcatcccatgctagtaatcccattagtattgttgaattcactaatggaaaaactaatgggcatgctaccagggcacattaattgggcacgacaccagttctggttttaattattaaactacgataatgaaatgtgtgtttgtaaaatattaaaatgttgaaatagggttgaagaaaataaaagggtgtgtagacaaaacagatataaggaaagtcaacctacaaaaatacgaagactagaacttgccagatggtcatgtttctagctgatggagttgtctgtaaaagttgggatattgtccatgtgagagacaacccactcatactcatgggaaattaaaagctttttttttttttttttttactttggtaacatgaaattctgtatgtcatacatgttgtcgagctctttatgaggcccgacaggaaccaattaaatgtgtagagtggacatgttgtatcactgaagccatttcagagaaagataaacagaaatcatactaaagatggtatgattaacattgtatgtttttcaatatacatcttcagcaccattacatcaaacaattatctattttctctttttgaaaaaaacagcatagcaaaattattagagtttggtgaaattttctggtaattaagtgttttggtaatattttacccaatctaatttttttaatttttaaagattttattagaatgagctttattcttgttaagtaaatcaactttattaagaagaaaattcattcccatttagaagttgtaatttcttttttatttttatttaatagtagtactagtagctgttggtgacaaagttgggatatctttcacttagtcttattcacttaacacagaaaatgttactataggtaaccaaggctactataacatactggaaaattgtttacttttctcgaaagtagtgagatggcaggtgtttcttctatttctctttctcagtttttttttttattcttacctcctatttgctaaactctgttcttaatatctgccatttcctatgtcttatcacttaggaacatgtttttaactattatatgattaccttagccagaactataattattggattttaactacaaagcattgtgtactacatttaactccacccttatgtttaatgtatcacaactggctagtttttaaggtgaatgtcattcccatttgttattgataattttgtgaagataagagtgacttgtctgacatctctctatcttcagaactcattttgagtggtattttatgagttttaaatttttctcttctttttcatatttatgccatgaaacttaaagtctaaaattttagaatagaaaattctttacccttctgatgaatagctatattcatcagaaaatgcaagtgactttgtaagaaattcttactgcaaaggtgagacctttacagatctgtacactgtggtgcacagggaagtattaatacatcacaggaaagccagaatgatgctagacatcagctttaattttgagttctgtttgaaatgtatgcatgcttgtatcaggatcataatcttgaaacttgtaaattggtttataacaaatatgtgtgtgtttatttgtagatatgcatgtataaacatttatttattcattcattcccttaaggggtcaccagtggaagtaactacaactaatgatcatggcaaacaatatagtgatggaaaatggcatgaaataattgctattaggcatcaggcttttggccaaatcactctggatgggatatatacaggtaagtactttttgatatgtataaatagccctgttgatatgttggtgttgccatacttttctgttgtttatattcctacattcttatttcaccataatttctactcaattccatatatattgctgttgaatttgcctttgggatgctcctaaaaggatgaagtctggcaaccagtttttcatccatgaaggtctttggtaaagaaaaaaataacaatgaagtcacctatgtcttttacagttctttacaattcgtgtggacctttagttatgttctgtcatcttacttttgacttccaaaaaacacatacagtagaggaaagcagtttttgtctgcatttggagatgaggaaaccaaggctgagaaaaaagtaaatattttttcctaacttacacagttgagaggaagcattcttgggacacacatcctgttttttcacatttaagtttagtttttgctccagcctaccctatctgccacatttatgtaattataacatgatcactgtacctgtataatgatgcaggcttttattaaattattcaggaaatatctaattttaatcagtacctattatgttccaggtattgttctaggtgctctggatacaaggagcaaagagaatactgtaaaacttacattttatgggaggaatggggcagcaaaatacagaataaataaatttaaacaaatatcaagtggtgataaattctgagaatgaaaaagccagatgagagggaaagttgtgtgtgtatgtgcgtgtgtgtgttaagaaaggtctctctgatgaggtgacatttgagcagagacctaaagggacaaaggggaaaccatgtaaatatccaggaagaggatgctttgggttgcgaggacagcaagtatcagggccctgaagtgagagcacactacatgtggcatgtcaaggaccaacaagaaggccagtgtgggaaagagggtgtaaaagagctaatgacatgacataaggtcacagaggccattagggatcagattatatgggaccttgtgggcttttactttgaaagaaggaaactgttgaaggattttgagggaagaatgacataatatgacggctttctttaaaaggatcacactagctgctctgttgagaataaattttaaggggaatgagggtgaaggcatggagatcagttaataggcttctgcaataactctgtaataattcagacaagaaatcatggagacctgaaccagggtgataattgaagatataataagaagtattcagattctggttatactgtgaatgtcaaattaacaggatttggtgatgagattgaggcagaataggggttggtaaactatcaccatgggctaaatctagctcatgcctgtttttataaagttttattggagcacaactacacccattcatttacgtattatctatggctgcttgagtctgaatagtctacaaagacactgtctggcctttgacagagtttactggcccttaatgtcgagcaagcctgtcaggtttgggtctcaggcaactggaagaatgtagctgccaaaaccagggagtgcatgactgtgggagaagcaggtttggggagagacattcaaagttcagttgagaacatgttaaggctgagatttctaagacacccaaggggagatatcaggcaggctgctcaagaaacaagtctagttctgaagtcagaacttccagcaaaggatggtattgaaagccaagggaacagatgtaagtagggctaattggagtggattgggctctggaaaaacaaacacaaataactttgcctcttctctcaaagaaggtgggcattagaaatatgaacagggatttccattgttatgccacacagtcagagacccaggttcccctggcctttggccctggcagttcgtactggaacccagcccactattcatccctctagagtacttagggggtgcctatgggtagagaaaggaagaggcctgagaggcaggcggtctggatcattccaacatcatgatgctgggatgttgaggaagagccagtgaagaaaagtaatgaacaggcaatgaggagagaggaaaaccaagagagtggtatcccaaaggctggtgaaggattttattatttgctgagctagtaaaactagagtatcctggtgaaggtgtatttctcatctcctcttctctaggttcctctgccatcctgaatggtagtactgttattggagataacacaggagtctttctgggagggctcccgcgaagttataccatcctcaggaaggatcctggtgagtttagtaaggtatattatatgttgtcatccaaacttagaatagaacctgtttacattattttaaagtaagaataagtattatgttctacctcatgctatattttctatattaatgtgccaaaaatttcctttaggtctcttttttttaaaggaaccatgtattccatatgacttgtatttatattgttagtactcggttcttgatatataaaaggaattcattaaaacttttgctgaaatgaattataataatttcagtcaaaggtatgttattttaggacctatgcatagttttttctaagattttaaattgaatgtgaaacaacacagaaatggaaaactatgagcttgatttatactctaaatagggtgaagaacattccctgaatactatgtgataggcactaaaccaatccctagatattcatagatgaataaaatgtggtctttatcacaatagaggtcacaggcgtataaacagacaattccagcctaatgccattagtgctataattgagctatagacaaagtgattctcatatttttagaacaagagcataagaacatattctaaaatgaaactaattaaaatgaacatgaatggaattaaccttagataggaaaaaaaatcacccttcaaacgcaatgctaatattctaggattgtttcccaagtcctcattaagaatcacagggtgcctcccaagtctctcccaggaagttaaaatataactacataaatattacaaataagctagaacccagataagtataatttgttcatgggttgcagtctcagggaatcatgatgaagatcaaaaggaatagaaagtgttcatcaaatttaggagaaggatatagttgaatcctcaaggctgattatagttacctcctcagaaatgtctctagattagagagggttttcattcaactacttgagactgacagagaagtccctctaaaacacacacacacacacacacacacacacacactcacgtacacagcctttgttttttgcccttctgggaaatagtatcttcaggtactaggagagaataccctgatactaagtacccttcctgtagaggacacatctccattatgaataaccaattttactttgtctatgtaaattggccttataaaactctcataaactcaaagctgaaaactaagctttgcccccataggaaaggaggtggctgtgtgaaattcgacctcagtgcaccttctcctcctcttgatttttttttcttgctttttctctaattctctcatttgcacattttctctctcaaccttctgttatcaccctattcactgtatttataaagccacctctacctggtctggagagttccacattcaagatcaacactatatacatttcccaaaatatgaagccaaattattgatttacttcagtaacagactggttcatagatgaggaatctaaactgtaaactatatattaaatagaaacactcccttccaatctaacttttaaaattatagtactttatttttgaggctagtggcagatgaattttctgtgttagttgaaaaggcaatattcttgctactgcaaaaccaaggtttctgcataaacatctgtttctgcagatatgatgggtttgaaccagcactaaacattataattgctatcatttactatagctgatggtgtggtgtttacatgaatcattaagaggcttgcagtaaataggtagtgagagctagtgcctatttctttgactttaatggcacataaaattaattgcttgaaaataatctttcaaaatatatatttcttgatatctataaactcctgcagagataatccaaaaaggttttgtgggctgtctcaaggatgtacattttatgaagaattacaatccgtcagctatttgggaacctctggattggcagagttctgaagaacaaatcaacgtgtataacagctgggagggatgtcccgcttcattaaatgagggagctcagttcctaggagcaggtaatgctctaaaaaagacatgagtgttcacttaaaatctatgttctatcctttgtataatttaatctctcctgtttgattaacttgacctcatatgaacctagtatcacagaaatacttagttattccaatggtgcacacaaatatattcttgacatctgaatatgcaatataaattataagactcataagtatacatccatgtatgatatctctggtaactcatgcagttcttgatttacatatgttagcatcaccaatgtccatttgcaaatcagttgtttggaaactagaatgcagttagagaggtgtacttagaatgcactcagaaagatgtttcaaagagttttgtttactaggttaatccacaaatgcctatttatctcattatatagaagaacaatgttcttagttaattctcggctaggtaatgggttaagtaggccattgagagagaactggagactagaaccaccatccctgccattgctcaaaaggctacaatgaaaggggaggtgtaagtgtctgtagcttacccctgacatgcatgcacattgagtctctgcctgatcagagcagagacttccacccaggggaaggggagagggatgatggtggcttggtgcacccggcttgttcatcaaataaaagcccatcactgcctcctatatttacagctaagttggttggttattaagttgcttaaactgccttcagcacaaaaaggcatatgatattaataatataatctacacattttttattctgttttcatcaaggtcattctgagtttcttttagtcaatgcaaactacttattgttaatatttatctgaaacagtaataatcttacatgatacagacaacacatgatttagagagcaaatttcttcctgttaaaaagtataatatatatcaaagtctttcttagtatatcaaggtctttctgtcacttctgtgcaattacaaaaggaatttcttaacattgatttgcatcttcttttgtgagatttactcagtggcagactgtgtcctagagtttcttagcacccttacaatgctggcaatattgtgttacacatgctaatatgtacatatttttatctttaaagggttcctggaacttcatccatatatgtttcatggtggaatgaactttgagatttcctttaagttcagaactgaccaattaaatggattgcttcttttcgtttataacaaagatggacctgattttcttgctgtatgtgaattaatttgattaaaattactttaaaatataggacccaactttaaaataaataaaccatgtgttggcattacacttaattggggtttctttacaaattcacatttgttcattttttttcccagtcatttttagttttgaagtcctgtgaaacattttgtattttattatcctagtaattttttaagatgacaattgtaacaattataattttaagaaaacagactagatataaggaattaagaaaattcaatttagtatcttaagatatgaaaaacactatttccctcattatcttttgatatgagttttgaaagcatatatattatatatttttcatatgacatatagataatcaagtataataatatagtgaacactcctggacctaccaccacgcctgataactgaatattatcatttttggtctatctataaagtctttcctatcttgtttccatctcctttcagatgtcataggtaatcagaattttgtatttgttattcacatgcatttttatagtttgaacacctaatgaatgcctacaaattcttgcttttgaaatttataaaattggttttatactctctctttagcactcaacattgtttctgagtcatttatgtgtccacataggtatacattttcttggctgtgtagtatttctcttctcttaccaatgatgtattggttgttcccatgttttgcttcaatgaataagactgctataaacatttttatacatttctctaaatacaatgggcaactgtaactgcttttccttgtctttaatcattagtttgataccactgttaaatacgttattaaaattttaattcttaaaagttgttttaaagaactagcatagaaacaggagaaaaatatgaacatcttacccttagattcttgatttctaggcaaatagacaaatacaagtcttggcttttaagagtctaagatacgttcatctttttttttttttttttaacattcctagcatacacaatgccaatattgctaagaagggaaatggaaatttatcccttcatagtatttattaaaatttctgcttttttaaatatttgtttgtcctcttgtgtattgttggcttctttctctgaaacgtaatgtctatgaatcttctctgaaatgtaatgtctatgaatcttcgctgaaacgtaatgtctatgaatctaaggaccttggttctcttctttatagttgtatcttcagtgcctaagccttagcaattatcatgttaatcaatattgttgaatgaatgaatgagtgaacatgtgaatgagctcatgctgtggtgaccttcactgagcatcgttgagtcatctacatgtgcatacactgtggaggatacaaagatgtttaccatttggctcctcctcttgaggaccatatgcctgagctggaggtctatatgccctactatgccatgcttccaccctccaccttcctctattcattgctttgttactgtattaaataatactgttaactttaagtaactcttactaaaaaaaaaaaattaaaaaattaaggctgggtgcagtggctcacccctataattccagcacttttagaggcctgggattataggagggtagcttgaggccagtagttcgagaccagcctgggcaatatagtgagaccctttttctatgaaaataaaaataaaaataaaaagttagccagacactgtagctagttccagctactcgggaagctgaggcaagaggattgctgaagactgggagtcgaaggctgcagtgacctgtgattgcacctctgcactccagcctgggcaagagagctctgtctcaaaacaaacaaaacaaaaaaaaatcaatacacttagataaatatatacggagtgcctattatgtgcttggctttcttttaacacttcccatgcaactgaaaggaagcagtctttcataaaacttaacattacggtctgccatatctgaggactgaggctgctcccagattacccctcaacaactctttctattatactgacttatttcaatatgcatggttatcccctggaacttgataaactcagaatgtttccattgctgaaaccttgaatctcaaaatataacctcatatccctctagctctctcagtctctctcattaagttcaccaacgcattgacaccattggctattagcccactttctagttaacttacttgctccttacctgagccactataatgtatttcttcaaccatatttctaccaataccctgatcttgtgtcttgtattgggcttcacaaaccttgatccatcagtccagccacctcgcttttcagttctagtagctagattgctaaacactataggaaaactaatacgggtatgagaacttgttttgagctctccaattcttttattaaacagtatctattgtttacaggattttctaatatattttagatgtagaaagtgaaagaaaaataatcttaggatctagaaacactataacctgaatgtcttcaggtagtctcacactctcctgataaaaacaagcatgcatattcaactttcagtctctctatcaacttgaccgtatttgagccaagccagatttcactctctaccgactcaggggaacaaatgaacaattaccatgcttacaaccaaagaaaatatgtctaccgtcatcctagattctatcccttcctctgtaagaacttgttctacagtctcccctctttgtatgttcaactgttccctctcaattggctcttttccctcaatatatggaatgattgaaatttattttccttagtgttttttcttttgtctgtgaagcctcctccactgtacttttccttaccttcatggtcaagtgcattgaaagtggttacttttgttattgccactttttcatctcacttcagtccctaaaatgactgtacattaggttcctgcccctaccacacctttctacaaaatcacttttctaaagtggtcaatgacccccacatttcctagcccaatgatttttatttcttatattttttgtcctttttctgtcattctgtttttttcttattcttccctactgattttccaaaatactagtttctcctgatttcattaagttctcttagcttctttaaggagatcattgtcacttaaaagaactattttctactacaagacccttaaaacattggtcttgctgaggacactaatcttttcccttttctctcagtctttttacactcactgaataatcttatttattttgtcatgtattttctcctttttgctgggccatccccaaactgtgtatctttatgtttgacttcctcaaaaagagtttcatctggatgttttataggcatttcaaactcaatatatttaaaatgaactcacccctcctccttgtcaacaacaacagtcagcatttctttcaaatgcttttcataacgtgatgatggcagaacaccctcctagttacccaaaaaagatgagatgtgttcttaatttctttttaattcatctaactcatttaccttttttaccaggtcctaatgagttgcttttacaaatacttctaagattgagtcttctctttcatcagcatcatcattatccttattttaatgactctcaatatgttttcacaattaaatggatttcctaatgcatttcctgaattctagtcgagattttgttttcaatgtgtacttcttatgtctggtaggctaagcttttagtgcaaggtaatactgggaagaatatgagttttggtttcagacagacaccaaacattctttccataccagaccctcctatcactgaaagtcctttaaaatctggcttctacatagctggcaagacactacctcacctcccacctccatatgtaccctttgtcttagctaagttggtgcctttctctgaacctgatgtcctcatgtcatgcatattagtccccctccttgggggaccctccatgaatcttatatagtttctaaaaccttgctttaaacctttcccaatttccagggagcaaaaagccttctctgttctctgctttcactttactcctttcttgtcttgattgttgtattgctcccacatgtttgcctctgctactagacagtatgactcttaggagcagtgtttaccttagagcagcaggtatatggcacattgtaagagactcgatatttattgaataagtggttagacaaatgaaaaattgcttacctgaggtccttcctgaagatgatgcttttatggaaaaattcataatttttatctggcatgatttaatttgttttactcgacacaattgatctcaagattttaaatatcatatggttactgatatggtttctaacaaagtaaaaatatattaggtaaaataattatcatgagacattttgaaggaaaacctatgaacttattttttactatgaaaatttgggtgaaatatgttcacattagaaaatggtacagtcatctaatagaatacacatagaagcaattatgttagttaaagatttagaataaaaccgaaatattgaatcaaaatatgtcttacatatttgaaattgagttcactagccagttaaaataagcttaatcaagcttgacatttcattttcttattgtcttgccatattttcccccaaattaaattgatatatgaagtagtattttctcattttctaaaaattcaaagagtcatagttcaaagtgttctgttctcttcagtcattcagtcacttatgcaggggtttaatcttctaactatgttgcagcaaaagtaaaccttaggtctacataacatcgcatcacatcctataatcattagtaggtatgaatttgtttgcatcaatacaacattcttcatgtcaactataagctagaaaagtgtttcctatgttcctaagcagaaacttagggtagagtgacacatttctatagagtgctttcagggaactgttttgcttttcttcaagaaattgactttctgctctctcccaaactgcccttctgcagcctttttatatacctactttcttttttaatataaaatacagatggagctgaaaagtggaatattgaccttccggttaaataccagtcttgcctttacacaagtggatctattgctggggctatcctattgtaatggaaagtggaataaagtcattattaaaaaggaaggctctttcatatcagcaagtgtgaatggactgatgaagcatgcatcggagtccggagaccagccactggtggtgaattcaccagtttatgtgggaggaatcccacaggaactgctgaactcttatcaacatttgtgtttggaacaaggtaagttccatctggaggaattcacaaatccatacagccctggtgctaacagtttttggtggttctgtgtttcaagagatagcaatagactcaggctaaaagcagcacccaacagcatctctttttctggagaaatttaaaccttaaaaactaatgaaaacactttttcaaagagttttgtgtgttacccttaacaatgtgccatcatttataatcagcatatttatttcaatatgtcctcagtaaatagtaattaatatacatattattattaatgtgacatataattatatatgtggtacataattatatatataaattactatttactgaataaatatcaaaataaatatgttgattataaataaggtaactgaggtgcttcccaaagatgatatttatatggaaaaattagtaatttatatatttatttaaatatgtaatgcaattatatgtgagatacataattatataagaaatatatgtgtgtacatacataattatatatataattatatatataatgcatataaatgtatttcctcatatgttggataatgatcattatctgtatttacagatgaaaaaataaattaagttggtatgcataactagtaaaaaatatcaatgcaattcattgccttttctttctttgacataaatgctaattgtctccatagtttttcagtagagctttcatgtggaaaaaaaatgtggggtgtatgtggttgacttccaaacatacttgtgaaaatctatatattgtagattattaataactataagagaaaggaaaagtgcattatttacaatttaggtgagaagttaactcatagacgtttgaatgtaatcagagaaataattaatttgaaaaggctaacaatatctgtgtatcatttcttgtggcagtcatggttctgagagcttacatgagaataggtgagtcaattattcataacaagtgtgttaggcattattatttatatcctcattacagatgaggaaactgaagagcagagaggaaggtaactttcccaaggtcacatggctagtaagcagatagcaagacactaagtctctcaggcagcctgttataaagtcaactctcctttttacagtcaatgctctcttttatgggcattggtcaatgctcctttgtaaagtggggaaagcatagtaacttccagcataggaccaagcaccctcccacgtgtgaaaaaggtcctttacgtatttcaaaatctacataccctgaatggttaaaattttcatgaggcaatctttgcctatttggtaagtacataaagatttaaatgcctttgaatagaaaatatatggcaagctcttaggagacttttagaagggtagtagtaaggagttaatgaataactggggtgtaagacagtaatgacattttcaaggcacttaagatgtaacagcagctaaaaatattacattcatataagagcttctccaggttttcaggtttctgaggttagaaagaacttgaaaacccttcgtatgagtgagattacttaatcctgtttgcttctgggaaaaaaaaaataaaaacaagaaacaaaaaccctgcatgtacagccttgttctttgaattacccctaaacccattactattgatggtcctaaagacgtggctaaaaccaaaattgtaagataataacagaagtttaaaacatcaccatagacccaaagggaataattttacctacacactatgactaagtctgtgatactggaagatattttattagtgagtaatattaaatttttattactgtagtatcatccatatcagtggtctcaaaacactgaaaaaatattgacgtatggtagctggaacgtagaagtcaaaattagccattatttttactattcaagatacattgacatcacctggaatggttattaaaaatacagatgttagggacccctgtcccctaagattctgactcagatgccttgagagacactgatctatataaatagctgcatgttttatacggtgatcagggagactagtcacaatacagaggtgcagcatgtatgtagtcaattgcaattaaaacaaatcatgttcatttaatgtatttctttcaacccactatcaattgtcttaaaaacgtttttccttttctctgcttcttaattagcaccttttttttttcatcagaagctctattttgtggtcatattagtgctattttttttttaatctactaacgttgcaatcttcctccgaaccagatacaagactaattttctttcttgttttgaaaatgctgggcaacataatttgctgaagatgtgccagctcagatgatgagagtttatcttcttagaatgatcaatgaggataatcacttacatctaggttgggcatgactgggtctggcatgtggtctcacaggcaatgctctgcccaaacccctccatggagagggagagagtgggggctcaaatttagcaggcctgccaagccaagcactctgcagcagtactgccttccctagaggaagggctaatgtttttctgattagtcatcttagagctctgggccgccttttaggcatttagaggcccaggggtggtggtgtggatggggatttttttggattctcacaagggtagtggagtaagaaaagaaagcatttccactcctctcgcaaacatcccctttctccttttgttgtcctcgcatctcattcaaatgttttaggtctggggagcatttctggtggtacagagttgaaagcacgggacaaccttaactgaactctttggttgccactggaaggaccctgcactagagctcagcagcttcaagagctcagcagtctccaaggccagaggccagaggaccatttccttaggaggattagtgcttacaaacttcattttataactaactctctaggcctttttcttcatctccaaaatgaagaaagatgtatctccctgggctttcccaaattgaaaatttcatcttgtgaattaatttttatgatgttttttgctaaatttttaattttttaaacattatggtaaaatatatgtaacatgaaatttaccattgtaaccatttttaaatgtacagtttagtggcattaggtacattcacattgttttgcagatatcaccaccatccctctgaagaactcttttcatcctgcaaagctaaaactatgtacccctcaaaaaataatgtagcatttcttataacagcacttgtttgccaagctgccctttcactgttctgattttgttggtagggaagttagggtacagagaattttgataatacagttatgtgccatcagaaaattactactgataaatacattaaaattcttagcttctgaattttccagccaatgatttcatattgagcttcattgctttcaattcaattcacccaacttattgagtgtctactgtgtgtttaagatagactagcagtattgatcagtcaggactaaaaaaatgtggataatagtaaaagacatttaaaaggaaataggctgcaacttaatgtgttagaaggcataataagacatcatatgaatgctgaggagaacaatatggtcattgttactattaacttattttactgttatgcatttcattatattttatttccatttcctgctgctgtgctttaatcttgaaaagagctgatcatgtgtttgaggcctttcaaactttacagtgttttgttcggagagagagagagagagagagagagaacatgcacgctacagcaatctcaaactcggtcctgtttgtcccaatttcgtgcagttttctgcgcagagtactgccagacttcactgagctgatctctgttttcacaaaatagcatgtaattcaaagccactgctattccctggctaactggatgccttttttgtttgctgtctaacaaaaaagtggtgaatactctaaattcatttcatccgcattctctgttaaacttcacagaatggtactgcgcagtgggtgttctaaggtcacctgtgcagaatgcacattccatgaaatctcatggtgttgctattgccaacagtgaaggctggcccctgtcatgctaatggggatgtaaaactggtgaccattttgtatgttcaagattatggaactctgtgaaaaatgatagagcatagtgacagctcttctgtaggctgatgtaactcgggctaaattctatacctctgaagtgatcattatgccattcatggcaatatttcaggactaatatattttgaaattatgttctctctcctggtattctacataaaatgctcagagtgtatttttccccaatgagcttactgaataatcatgctaattcaaatattattttttggcacttaaaactgacttatatagtaacttaatctttcagaattaagagacatggggctatccccctaccataatatgaagttgcctaaattttattttatgggaagaagcggaatttagaaaatgtgggcctaaggaggtaaaataaatgctttttcagtaccaaaagttaaattagaattatccattaatgtgttttccaaataacagaactatatttctttgcaacaaattagcttgttaaaaagtaggaggcataaaaggttttccaaggaagactcgaaagtctagcaattgtatctaaccaccccccttcctcaaaatgtagtgctgcagaggacaaaaatgattggtaattaatgactcaagccctttatgcgatactaatcccttactatttgctaggtttcggtggttgcatgaaggatgttaaatttacacggggtgctgtcgttaacttggcatctgtgtccagcggtgctgtcagagtcaatctggatggatgcctatcaactgacagtgctgttaactgcaggggaaatgactccatcctggtttaccagggaaaagagcagagtgtttacgagggtggtctccagccttttacaggtaatgtggaggtcctctaaattaaatgttacatgtctcttattcatccccctttccctccctgccagcccctcattaatctatatgagtattattttaatcttgctgcatcttatttccatttaagaatacctgtatcgagtgatagcctcgcatgaaggaggttcagtatatagtgattggagtcgaggacgtacaacaggagcaggtaaatacttatcttcaaatgcatatgtgcacacacacacatgcatgtatttgtgcatttatataaaaggaaggactattaccctgaagcagtaatatttttgtagtcttctgacagagcatgccttggtttgaaaatacatctgtcaatggctaaaatgcttagtagatcagtgcttttcatttaccaagaattcactaaatacttgctcagacttgatcctttcctcttaggatgcagaagtaaggaaagttcaggttgtcttaaggatgtaatagtcccacctacctaacatgtctaaggataggtaacctttacagatggtgtagatagcaagaagctgaagtcagggattaggattatccttggctgggagtggcaccttcttgactttctcacagaaagcacatttgaaacctgcaactggttggaatcaggggtgtctatgacatcattgcagatgtttgccccgttgttgactattagaatcttagaatgactctcccaagagagaaattgctgattggtttaatatattttgaattggaaaagaaccaactaggagacagtatacattagacctaatctcagacaactgacttgttttgtacttctgactggccacaaaatcttttcccaaaataccaccacaggaaggcattcagcacaaagagttttgtgaatcagtgacattctactattttgggtcaaatatttgtcaggaaactgaacacatctccagatgattgccacttatgtctcagcaaggaagtttattcagcgagtatcaatttgtctaaagacgtgtttccatcaaggtattctcttatacttaatcaacagtaggttactatcccaggcatcctttgaggaatcttcttaatctaaaatataattaaatactgagatgagcaactaagaataattttcaagactctctacctacatattttccagaagaggacaacttgacacttttccaggatgatttaaattatcacctatttataggcaagacaatgagctgaacgatctcttaaaattcttttcaacttcagagctaagagaaagctccaatataaaatactcacttgttactgacatgttctctgctcctatttcacactcttctactttattaacaaatataaagcccgctttgagtataattcagcaacattaataggcgtctggaaagcacattgcttacttagcttaatagtccccattttgagtactactgagaaagtacacaaatagagctctgaatttatagcaatgatctgaccacagccctatgccataaattcatatttacaatctgaccacaacactgagcagctacatgctcccaagggttggagaataattgcactatttaattatttttgagtcagttttgctctgtcccttatgagaagaccatctgttagactgtactgtactttgccctgtaccacatttccgaactaataaaatcagcgtcactcccattgtccctttccttgcaactcgatcttgtggcctgtgtgttttctataggtgtctgtagtgttttaactgctcagagagtggttctcccctttggtgtttcctcttatcttttatgttcactttgtttcccttaaagctgtcctactttattggtctggacagtaaagtcggagaggaggagatttgatgtggaaaaaccagagtgatcctccatcgacagggctcaggagtccatgagcagctagagcaggtctctcatccatcatcctgccacggagttccttgggctctttctttgtgtccccagtgcactcagctgtgatgaagtttttactgatcagaactgtagaaatgtctaataaatagttaaaggtaatagattttttaaattagggggctcagcttgtaagtaaggttttgcagttcttttaaacttcctcattttgtgatattattttgaaatattctgcagaacaagactttgaaaatgactttgtagaatctcaaaggcaccagctcctttaccccacccccacccccaaaaactgcaactaagaatatattccatatatcatatctggtagaactttgctttttaaaaattaattagaaaaacaattgcatttggaaaatgggtctaggcattcaagtacaacacaatcacatttgtgattttttttttggctaatacatcgaagatataaaagtgtcaaactactatgtataataacagtctaattatcttgcttcaaagggggtacatcattatattgcttgaacttgttatctgcctaccatccacctccttctttatgagtgatgtttaaacatgtctgatacattaaatgtttttggaaaacctggactagacttgaaagaatgttatgtcgatggagttttgatggttttgaaatatcgcttaaactgaatggctcaagatgtgcagtcatattaaatcaatgctgaaaagttacaactctaataaattgtatttatgctaatggttgagtctgatttactgcggccattaaaagtgaagaataggagcaatagtcttctcagaactgccattttccctattttctcttttattccttcacagctccacaaagtgtgccaactccctcaagagtccgcagcttaaatggatacagcattgaggtgacctgggatgaacctgttgtcagaggtgtaattgagaagtacattctgaaagcctatagtgaggacagcacccgtccaccccgcatgccctctgccagtgctgaatttgtcaatacaagcaacctcacaggtaaatgcaatcctttaacagagtagaccctattaacttcctttttgtttgcattttaaataaaaatcttctgcaaatgttttttagaaaaatgtattaaatatacatgtattttacctgattaaaaacaacacccatctaaagtagtggaagcctgcatctacctaggataaaaaggataattctacaatgcgcatgggctctcatggataattttattctaaggtagatattctctccatcccccaaagattacatcataggtggctatagccctttaacaccttatagacatcttttggaaatcctatgtataaatacttatttcacaaagcaaaaatttactctttgggactagccccagttcataccactattatttattgtaaaattgctgattaaacctaattatctcaaggtggaggagtcttagagccccagttagttggactggcaaatcagtgaatcgatttctcacagtgtggtgtgccatgaagaatgattataatgaaatatactcatacacaccactaacacatctcacactcaaattcatgcgtgtgtattaagagcatttttcagcttcatgaaatattaaagcacatttaaagggagagtttaatttaagcctttgataaaagggaagtaaatgtgtcaaatttgacagaaaaaaaacattttcctctatcaaaaaatcctataacgtgaaccatcagaatggacgttagaaaagccttaaatattttcccaacaaacctgttggtcaattccctcaagactttacttccttctttagacactttggaatgcacagcccaaatatactaccaacttttagcaaaagaaaaacaaattcacacccttcacttctttcctattttaccctccttatcaaagcccagcctgagtaagcccacagcttgccttttcacaggttgcatatggcagctacatgggctggaaaataccaagtagtttattgctaaaaatgctcaaccccactttcagatgagcactcagtaatgacaccaaccctactgtatttccagaatagctccttcccccattctcctcattaaatattttatatttttccaaactatacacgttacctccctttctcatcccactcagctgacagcgttctattttagattatattagacaccatagaaaaaacaatttattttataggatttctattactttcttactaccaaatgtacatattaattgcatttttctgcctgatggagttgttattaggggttggatgaatgaatgcatgctaaaacacataaaaccattttgatatacaggaggtgtgtgctatgctataattttattttcattattatttttaattttcacgctttttttcctttctgttttacaaagcttctcttatcctatcaaaaatagaaatcttcacaagtcctctggaccctgactctttctgtttcttcagagatattactgatagcttatcgtcctctcacttatatttttaacgcctctgtctgctgcagtagagtatggcccaaggaccagcattactagcttcacttgggaacttattactaatgcacattctcctgccctgcccaccccacacccgccaaatcagacactctgcagtgtggctcagcagtccttgttttaacaagcccccagatacatctgatgtatgccagcatttgagaaccactgactgggtggattcttcccagggtcattcaaactcttttatctcccattgttaaaaaccaacacactaacccaaaccaatcacaaaaatcttaattctgtccaaactcccagctattgctccctctctcctcctctcggccttcgtctagcatgaagtatctaagctcattttgtcctcacttaactggcttctgctcattactttcgtgacgagcaccaaaaactgccatgtttacataggcaaaaaacacttgacactctatgtcttcaccactcttcagcattctccacagtaactctttcatcatttctagaaatatttcttcacttctgtgacttttctgcttacctcctggttctccaggggccctgttctcagtgtcctttgctcacttcttctaaagtgtgacaaaatattgaagagtctcaggatttagaactgggccgtcttctctttctctttcatttttttctggcttgctccagaagccttattgactctcataacatcaaataccagatagatgctgctattgactcctaattgtacatcccacctagacatccaaatgcctgcatccaataggcgtttggacacaatgacatttccaactggatgtctctcaccttctacccataccaaacctcaactcttgcttctcctgcattctcatagatacctccagccacccagtcaatacaatttgagagttactctggacttttcacctccttcacacctcatatccacagttgtcattctatttttcaaaatatgtgttaaggtcatccatttctcctctaatctactggccagcccaaactactaccatctttttcctggacaactgcaatacttaccttcatctttttcatagccttttttttttttttctctccctggccgtgagtgtattctacagagcatccaacatcatgtccctctcctcaaaaactttctttcttttttttttaattatactttaagttctgggatacatgtgcagaatgtgcaggcttgttacataggtatacatgtgccagggtggcttgctgcccccatcaacccggcatctacattaggtatttctcctaatgctatctctcccctacacacaccctccaccgctcgacaggccccgatatgtgatgttcccctccctatgtccatgtgttctcattgttcaattcccacttatgagtgagaactcgcagtgtttggttttctgttcctgtgttagtttgctgagaatgatggcttctagcttcatccatgttcctgcacttcctctctcacaatcacactttgtctgggtctccccctacttccagggtttccaacaattaccgttgtaattaatataatttaaagaaatttgtatgtaaatccttaggagaattcctgacaatgatgatataataaatccctagcagtggaataactgcatcgaaggcttttaagacattgtatagtcttgaactttgaagtcagacattgatataaatctctgctatataccttccctgtggataagttccacatccttctggatcctaaagtcctaacctatgaaatgggagagtgatatttacctcagaagaatattgaaaatattaagtgatatgatattctagctctaaccctttttagctgtgtagcttggacaaatcaataaacctctgtttgctttaaaatccttctaggtaaataagaatgagatacaactacatgcctcccagggcagctgtggggattaaacgaattcatatgtatgtaaagcacatagcacagtgcttgacatgtggcatgcactgtatcaaagttacctacaggatatctgtaaagtgtgtaacattatgcttaatgcttggtaatttctcaagaaatggatagcaattattattattattattactattattatttaatgaagtctcactctgtcgcccaggctgtagtgcagtggcgcaatctctgctcactgcaagctccgcctcccaggtttacgccattctcttgcctcagcctccccagtagctgggactacagacctccacgcccgggtaattttttttgtatttttagtggagacagggtttcaccatgttagccaggatggtctcgatttcctgacctcgtgattcacccaccttggcctcccaaagtgctgggattacaggcgtgagccacagtgcccggccaggatagcaatttttacactgcccaaaaagctgtacaaattatgcttccaccagcaagcagaatgcaagattgtgcatttcattttatctagccaacaccaaggtttacacttgaaaaaaattgcaaatttaaaaggcaaaatatatcagaatattgttttagtttgtatttatgtgattactagagagattagttttttaatatttattgaccatttctacttcttttatgatgtgcctaggtaggtccattgttttttattttttattttattttatttttttattttttgagacagggtctcactctgtcacccaggttggagtgcagtggtgcaatctcagctcactgcaaactctgcctcctgagttcaagagattttcctgccttggcctcccaagtagctgggatttcaggtgtgcatcaccacgccagggtaacttttgtatttttagtagagatggagtttcaccatgttggccaggctggtctcgaactcctgacctcaggtgatccaccagccttggcctcccaaagttctgggattacaggcatgagccactgcacccagctgcattgctaatttttctattgaatgattcacattttctcattaaagtttttctctgcatatgaagaataatatacatgtttatctcatctaatgcaactcccccagttttgtcattttttaaaaaattttgatttgcatttttgtgtagagatttaaaaaatattttatgtagttaatataacacccttaaaatgttcaatattctatgtgtgattttttaaaaatatatattccccatttagggttgattattgtttatgttagatataccatattgataacatataatgcatattcctcaaaatagtaattctaaggttaggataagaacaaatcagaaactggatgcagggaggcttttcaaattaaatcagcctctcccaagattctgaaggataccttcttgaaggcgagatcccacagattgtaaaccaatgtagggcagtactggatgttactcaaaaggcatgtcatacatggtagtgatgtatagggagaagaaaatcagaaaactgttgagcaattgttatttatttttatatatcaaatttgtcacaaactaagggaagagttaactatgttaactatgcatgcagttttgtcaatttctctgagatttttttgtttgaattttttgagtttttattacttttacacttattatttatgttttaaccttcaaagtctcattgctttaggtacagtcatgcattgctaaaggatggatatgttctgagaaatgtgtcattaggagatttcatcaccttgcaatgtgcttacataaacctagatgacatagcctactccacacctaggctagatggtgtagcctattgttcctgggctgcaaacctgcacagcatgttactctattgaatagtgtagggaactataactcaatggtaagtatttgtgtatctaaacagatcaaaacacagaaaaggtatagtaaaaacactgcatggtaatcttatgggaccaccatcctatatgttgtctgttgttgaccaaaacattatgtagcacatgaccacatggcagcaacttggctaacatcctttaattcaacattgttttcttataagtttgatgagaaaattaaaaaaaaaaaaacaatccctagcaagggccactctctgcatggaattttcacattttccccatgtttttgtgggttttctctgggtactccagtttcctctcacatcccaaaggttttccccttacatgaattgagttgtctacgtgaccccagagtgagtgagtgcaggtgtgtatgagtatgccctgtgatggtatggtggcctgtccagggctgattcctaccttgagccctgagctgccaggatgggctccagccacccacaaccctaaagtggaataagcagattggaaaataaatgaatgagtaaatagaaatcattataaaataaaaattcataaagtctatgataatcatacagatgcacagcaataaacaattcagtatgacagggctcagcaagctgcccagtctgtgattgctggggtttgaacttcatgctggtaggcggtgctccttacaatgttcacttggaaagcatttattccttgatttatataccacaccactgtcactcactgattcaccaaaacttgagtaaatcattatttcgttttgattaatcttttgtaaatgcatgtatagcacacattcatttcaatgtttaatattagtagtctatagaaatttggtgatgttttgtgaccagaaatatgccataggatcttaattcttttttacatcaattagcctgtgggaaaattgggtttgttgtatatcatttcacttaaaagtgatagtttacaaaaaattccaatgacattaagtgaagacttctatatatctctgcagttttagttttatctttcacttgagattctctgtatttaagtacgggagtcactcattcatacttgtttttataattgatataattggtcttctctctgccatcatgttttatgctttccagttttattatttcttgttttttagtgattttttcactacatttcttgccaatgtgtactatgaattctttgattttttttctttcaaggagtttgcttctctcaatgctaaattgagtcatcaaggacataggtagaaggtaatcttaaagactaagaagaactccagtattgccaggtggacttttcattgtgaagactcaggataatgaggagggaatgtgaattgagagtcaccaaagccagcttggataattatcaaagtcagagaatttcccagtaaacaaaaggaatactaggaagtgagatggaaggagctgataaagcagagagccagaaagctggatttggtggagacgttaggggtgcagagattgttttgaggcagctgttttgccagttggttgagaaaccaaggtaccaaaagagagaaaaatcggtgaagcctatataaacagttttgctattgagcagttttgctactgatcttgaaaataacccttatttagcatttctgaggtgacttttgttgagattttaatatttaagttaattttggttgttagagtcatatttaaataaaataattctgacactgaatgtacaaggcaatttcgctttattagttagcgtagggttctttaccaattaagtttaaaaaatgctaatcagaaaatgtgctgttttatttcattaattttttgttgtataataagctcttttattcttcagatttgggtctttcttcagcttggaaaatttgccattgtgtttatgatcattacttctggtgagaaatagcaattttcaatattgtatatttcttcctaggttgtcttcctcattttagtagttcagaacacggcttgtagagtcaaatcaatctaaggtcaaattccgcctatgccactttttagctgtgtgatctcagacaaatttaaaaacatatccttacattggagtttcctcattcataaattggggatgaaaaccttatttatattatggaactgctataaagattaaaatgagttatgtaaaatattttgctcagaaacaggcacatagtgagtgttcaatgaattcatagttacctttataatctctgaattacagtttctgatttctgggttattgtcccataattgtttttatttccattttctgatttttgcactgttgattctgctctttgaaacttctaagatgatttttaattcttctagttcagtctttgatatgatctgcctttttcctcatctagcttgctttgatttctgcctgcctcttgaaattctcaatttttgtcttcatctcttgtttactgcttaccttctgtctcttacttagtggattccaagttattttagatctaattaatggcatgcaactcgtgatttttaaattttacaagtttcttgaattaaatcctccccagaatatgacaatcttccataatttgagggctatatccttatccttctttcaagttacaatttttccatcagctaaatgtcctcccccaaactcaactccatagtttagttggctcatctctaatataaccttctgactgggtgtttgcatgggaaaattaaactgttttcaaatcatcttactgggcatccagttgctgttaataaaagcctttgctaagatgatgacagggttagtggggtaagtttgcattagccgcgcagccaccctacagtttcagcttctttcttcccagtgtttggtagagtaggagtgctgagagcttgctggcattttgcttccagtttaagtttgggtttgcctaggactttccttctaacagtccattgtctctgcctggtctcgttttaggtatttataaaactttggtcgtttcactgggattcttacaaggtggtagttcaaaactatagctgtatactgagtcaactggggagctttaaaaaatatactgatggctgtgtgccccacatgcaaaatgtctgattaaattggcctggaatgtggcctggacatttgtacttttaaattatctcaggtaattctgctgtacagccagcacagggaaactctatttaaaggaggagtttgtcaccagtgatcacatttaaattttatccagatattcttataactttcatttccccactgaaactcaaaaatgttaggaaataaaaaactaaatgtatataaaaaataataagctattaaaagtaaatagaaaatactagcaaaggaatatcataagatgacaaaaattaagtgtaatagttattgggaagtgggattttatgttcagacttacaaaaagcagaaggtaaaagcaaagaaaattattaaaaatgaatatcaactaagataactgaagaaaacagaatagtgaagcagaatatttaccattcatgaatttgtctatcagaggattaaatgagataaatcccagttgcaatggagagtccaagggttaacaggcccgctcaggagcaaatgggcccctttgggccacagggtctagattctgtgccctcccaaggccaaggttcagagcaaggagttctttaaggttcattccctcagccagagcctcagggtagaaaacccttcagttatcactcctgtgtatctttagatttgttgaaagggctccaattaactctgggtagcttttgctgatttttcctgcagccctgttaacatgcaaagctgcagcccagagagacaggactggcgtttcccctcaaactgaggactgctcagaaactgacttcataatttgatttgaaattatttcaagaatgaatggattcaagacttcgcacatatacgaattattttttccgtaaggtgtttaaacatgtaaacttaattatcagcataattactacagcacctggcatcaagtgttacagatataattggtgtatacaaaatattttctcaattttattgttgcattacattgagctaaagtctaggggttatattgcttcttcaggtaaaatgataaataatagtaatatttcttactatttgctatagtttggcaaatgaatcaataatgataagaataatcttccagatgactcacatatatctacatttatgtaaagaaaaagacattttaatttataacacaaataataatatagcttttgccactaaaattgtttcagtctttacatacaatggacttaatttttttacctgaatgaagtgggtttcatactgaaaatctgcctctaatttttgcctcttttacatggctactgtaataattagtgactctcaattctactggtcataaggtgattctcagattacttataaaatgcagatttgggggtcactcacacatgattctgtacatctgggctagtatttagcaatttgcattttacctaatgctccaattgtatttttggaaggtttatgaaccacatattgaaagacactagtgtagaggagtggtcagcttagactggaatactttcacctgctaggcttgcaactatccctgctttattcctgcttctggttctgactgtgttagctttgctgccagaaaaatgccaaggcaagtgaagaaagagaggcagtgtcagtaggacccctgaaccccagtaggactcctgaacttctgaaaattcccagaagaaagaaagtaagaattggggatcttgataacatggattctgattcactaggtctgggaatatggtgttagattctgcatttccaaccagccccctcccactctgtcatgccccatatagaaaggcaaggagctcactatttatatgggaaatggaaaacaacaacaacaacaacaaagaaaaaacagtaaaataaaacaaaacccaattctcaattacaagatgccccttaggttcatataaaagtgagagcagtataattcaatgtaggaattatcattgcaatgtcttggtagagccttgcctgcatgcatttaagttacaaacattcaactacatattttggaaatgggtaagggatggaggaaaaagtaaaaaagcaaaaattaaacaaaacaaaaacctataaaaatagtgtcataggcaaaggatgctatccagtatggaaaatgtcaacatctgttagctggaaagaatgtttgaataattttagggtttcccagtcattgacaaagaagtgatactcattgtttgggtgtctacaaaaagaatgaagacttcagagccctgaagaatcattgatttctgaagagttagaggcatacacaaaaccaaatgtactatactttatgggccatataaagagttgtcaagggaactttaaatcacgttatttttgccttatgcctgattttggaacttaaactcagctatgcagagtatcatcagtaagattaaattaaattaaaatgctactctatatatgtatgtatatgtgtatgttatgtacgttcatatattatataaatatgctctctctctatatatgtattctctctatatatatgtaaccatacttacctgagaagtctgcagagaaatgactgtaattcaacgccgtgaaatttttttttctattcaactgaaagttcttactccatagttgctaaaactgcctatggtactctctgtgcacccatgctatttcttcaatagacaataagctcctggaggacaagtttcatgtttcatatttattttaagcctcgttcactaccttgctcaaggtaagtgattaatatacttatcttaaaagaatgaatgaaggaatctttcaattagcaaatgtagctttctgctactaaccccatagttaacctaatgttaatatttttttgtgctgagttggactgagtattgaactactagtccttactaaagtctcctcagtcttttatcaacagttctttaattttatagaagaatgcacagagctatcacaacttaaatgtatatttggaacttaatacacatttcccaatagaaaaaaaatatgttggtagggtaagactaataaataactaataaagactaattccaaaacttagacctcagaatagaacccaaccactacatatttgaaatgaaaaataatggaagccaatactgctgcaatgctgataattataaagaacagaaaatattcatttatttaaaaaagtgatctaccacgttccatgctagtgctaggccctatcattgtaacatgatttttataacactaaaatatagcccaagcactctctctgaagtataagattatgtagacaatgaaagttttatagggaaaacctaacagagatgggtttatcatttttaattcattatttcacttgagatactgagaacctaaaataatagcgatgaagtttttctctcactggtaataggtgtccacagtaagtcaatgcagaggcgggatgttcataggcgagacccacacacttcatctttttgctgtgtcatccttatggacaaggcttctacctcatagttcaagatgactgcttgagctcctgccatccagtctgattttcacccaacaggaagaaataatggttaaagaatactcacattcactttaaagacatattttagaagttgttcctccacctctggttatcttgcgtggccagaacttagtcacatggctgtacctagcttcagggaatgttgaaaaatgctgtctttattccaagtagccacttgcccaggtaaaaagtgtttttattttactgaggaaaaggagtataatacataataaggagcaattagtaatctttgccacaataggaaatcgtcagaagtaaataaaaagtaattctttttgttggtgttattaaagataaaagccagtttttatagtagaccataaattaatattccaatatttgtagtttattacgaacttttttttttaatttgagatggaatcttgctctgttgccgaggctggagtgcattggcaccatctcagctcactgcaacctgcgccgcccgggttcaagcaattctcctgtctcagcttcccaagtagctgggactacaggtgcatgccaacacatctgttttttgttttttgttttttttgtttttgtttttgttgttggtatttttagtagagatgggatttcactatattggtcaggctgatctcaaactcctgacctcaggtgatccacctgcttcagcctcccaaagtgctggcattacaggctacaaaatatttctttaaatgtaaatcttgaaagaaactggtctgaaaaaattcacaggacgaaaatatggcctatgacataaatagtaaaaatagaaatgatgtaatgttcctgcttagctaatgtagaaagatttcattaggtaatgcagtgttgatgagttaatagctttgtctaactctcctgaatacataatgtgcctgaactactggtacattgtgaaatcttcagagagagttgttttttaaaaaaaaaagtttttcattttattttatgcaataagaattgacaccaaaggatttgcatttctttttggtaacatgttgagccgtagttaaaaatgatgaaaatatataacttttgttctacagtgataatcaactaggcatgtccacaatgcttataaacattcaatacaaatacttcaaggttatcaatcatagttgataaagaagaagaatgcacagccagacttttctgttttctaccttttatgatcattttatatttgtgttatatttggaacaaattaaaagggttatatgtataataaacaaaggtccaatattgaacccaatctctctctctcacacacacacacacacacacaaatgcacacatagaatttcttataaatcagtcatttttgtaaaggaatattacaggcatacaaacttgctcattttggaggacaagacttctaatttctgtttgtaagcaataggtgtcagtaataaatttgaacctcttaacacattttaaggtgcattttaaataagatattttatagtaaaaagtgtgctattattgtttttaattaccatttttcaacacttttttcttgtttgtggaactggagcttaggtcaaatgggaggagtaatgatcttggggtcagaatacaggttctaatattggctctactgctttttagctgtctggacttgagcaccatacagtacactcactccaaaagcagcctcctctgtacaatggaataacaatatcagaggcttgtagcaggggaccttggacactgatcataagggatgactttcatttctctttcttttcttttcctcttgtctccttgcctgtctctctgcttagtcaggtccagtgttttcttgaagagtttcagtaatttcagtgtgagacctttatgtaaggtaaagagttaacacaagcacgtggcttcaaacttattggcaaattagaataaaaatggcaaagactctgtagttcttaccacaaaggcattgattaaaaatttgaggttagaggtaaacctgctgagagaatcttaactggataatactttgaggtcaattaaaatcactgtttaaaccgtcctctaagactgggattagaccacatattttataaagaaataaagaataatgtttttcctgtttgtaagaatcaacatctgcatagtctttgataggtatatgatattctatgctctctaccaaaagttttaaacaaggtcaaaaaacccatttgaaggaaattaaatgtaagaaaaattagttttgaagtttccaagggattaccttaggtttgggttaagtgtatttattgttccaccttttgggtaaaatgcaaattgactttccctttgtaaatattagaagtccttatttttattgaaaatattatccaaaaacaacaataacaaatcccaccctcctgggctaagaaccagaggagaagcatcctggatatgtttccagatctctattagatagttaagttttcatccatatttaacaaatgtcattattcagtttcatgggatcactgtgtcaaaatgtctgtgttagaactttattttcagaggttcctttaagtggtcaggaagcatggcatattggattgattactctctttaatccatccactgggttggtttgggatgtatacttaaaaattagattttatcagcactgcagcgggatcctcagccagaagtctcttcttctgccctccttcccctagccagttttcttttaaaaagtgggctcttccattatgtctccaggtagcagtagcagctctgcctgtgtggcatcccttaccagatggccctcttaataaatgtcttgctcttgcccaccctcactttcttgatccaaatgtgaaatgccagcaaataaataagagcattgtactctgatgagttctcttgagatgggggaaaaccctggggagaggaagctagaaacagcttttctgtttgctgtgactgctcctaattactggccagtagtagaagatatcatttagatgcagtagaatataaagataaagaaaaaaaaatgagagataaattctccatgttatcccaaatgcctttgctaacgtggaaatactcttggattgttggagtgcatttgaaatattgtgcatgatccttacaaggggacccctgactttggactcagggtagacagttgctgcatgcagatttcaccgccagactaaaagtgcaacggaaatgagtgggtgatgagagcagagcagccagttctttaattgaattaaaagctgggtgacatcaatgcagacacctgtccaattacagacaggccaaggtgtttaccattgctgtacaagcgattcgaagatgacagaaatctttccgcccacagattaacataatgaaggagaacagattacagtggatgccggccaaacaccttggttggcagctgggggtggggtgggggagggaggaggagtctgctgaagtatgtaagtagaaacggagtccttttttcttctctgaaatatgctcggctttaaaaaggatccattttgctttgtgtcttaggctcggtttccaggcagagcatttatacttgtctgcatttagtcagaggagttaatcataaaatttcaacgtgaaagcagactcctctgttgttttgctgcttctcagcatacggtgtcccattagaggtgcaaaagcttgcagagctggtgtcagctccacaatgattttgtcttaggtcgtcaggctgcctccaattattaatatttttctttggctcctttgaaacttgaggttacagcaaaggaaagagagtgttggagataataatgtatcagtcaaaagaaacaatgtctgtcactttgcttgttccctggaaggggcgtggtgggagtcaggctctcctatagtgagagaaatagccgagtggagctaacagtctgcaaaatcttaattttcagtcacccgtcaagtgctaacttttggtaaaccatactaatagctgctgggatagaggataaggaaagcagtaaaaggctatgccctctgtgttcaaggaattcccaaatcactgtgaaggacttctaagttgcaagttctctaggccaatgctcttcccctctgttaagtggaaaccctgagtgcacagagtttggagccatatgcagtaggcctcttaacctatctacggtgatgagtttccttcccttaaatcaagtccctgccccctgatctttcagcttgggctttctgcacccactgtggcccacaggacttcaattcaaagggaatctacttacttgacttcaaactcccttggtgtggcatgtcaggatttctcaatgttaggcattaatgcaaaatgcattatcgcttagcagtgagagttatggtcctgctggtgccaatgattttaatccggatacccacgctcctgtgtttcatgggatactaacacttttaagacatcaataatgcttactttatgcttattgaatgtttcttcagcttgccctcttccattacctagagggactagcaggtttcctgacatgattgggaccattttctgatttcacagagtttgtggctgaaaggcagtttgcgaggtcatctggcctgccttgtaatagggacactctcaaaaaaaaaaaaaaaaaaaagacttctctgggatgtgtcccaaacaaagagattcacaaccaaaccaattttaaagttctccctttcaggatatacttcttcagtataaaaaccccaagtgtcacaagtatcataaaaggcaactaccgcattttctatttttgggctttctgtctaggattcctttagatatgtcaattctctatttcccagtattctttttaatataataccaaaatatatatttaaattaaatttaggcttcctattatcttgaactggtaagtctgaatcttataaatgtcattgtctacttggcccgtatgcaaacattcttctttatgtatcaatctgttactgtaagaattcttctagttccaatattttcttatgttagaaaccttgtaaaaatcagttgtattctatagcaccttttccagacgcatatagcggaaacattgataaatgctttttgatgatgatatatcttcagagtaacactgtattttccagagagtacctaatctaagtagaaccctgacacttaaagcaaagccattaggataaccactcaatgatctcaaaggatatatccacaatctacatagtcttggagagaatgtgttactctctttctttggccatggcacaacttttcaacttgaatccatcctggtgaacactacttactgagaatcaaaggagataaaccacgtgtctccaacaataaaatgaccttgtcttgattccaagtgaatgaagaccacatatttgaccagccccttgcccttgcataacccttaatttttaacctgacaggaggagaaagcacagtgaaccattatagtgttcttcttcctgaagtaggtaattctaactgcctttaaggaaaattatcagttggtttgacaaactttgtctctgacacacagcatgatgaacaagattccctactggaaatagaaaagaaatggcactccagccttagaaaatgcagcacattttttgaaagtgtgatttacaagccatctaaaaccttccatctttgatccaaagttggcaagaaccaaaacatcagctttcttctttttctttctttttttttttttttcctttgttttctatttttcagctctcatttctcagggcttattattgtttcaccgggcttgaaatgggaaatgtgagcactttgataaatggcttgaaagatgatctagtttctctccagcatctttctttaagagtctcagggtttttctatgaaatacaatacaatttggtaaagatctctaccaaatcaaagctgaagaagcaagtttgctgagatgagcagtgcttgcttttaaggtccttaaaataaggagtggctaaaattaataaaagactctcactatacacatgttatacacaacgtaactcctttagtgaagacaagaaacattaaataaaacactaaagatcacttagtgagttgtgaactcaggatctggtttgatacaatccctctgaaagtctatagaatacccttccttataacttgatgtaacaattaaaatttcaacatttcactctagttatgatttggaaagaaatgtcttagtataaggaattttataaagccaggctgtaaaattgtacaatcatagagctgcttttatatttctcaatgataatacttcctgaatgtacaacacatcttcatgctaatgattgcagataaccaacctgtatatcagcattgtttctttttgggcatggtgttcctatgcctcagctgaagcatgctcatctatgaagggtgctgcttttcacatatgccccataggttaagtgatgataaagggaaactagcctcatattccaacatgcttttccttattgacattaggattaaaagtcttattctctgggggctgattcatttcttgttagcatggcgttatactaattcagccatgcaagtcatcttatttagaatcttacggtagtttccaacttggcaataggaaagacatggcaaatgccaaagatttgctaaagatagaatggctaaaacacattttatgatgataactttagttttgagcctggaatttgggtatcgtggtggaggcattacaaaatggaaaaatgaagcttacataattatttagaatgttgattcttggttggggcacgttgagtatgaaataccagtgggacatccaggtgtggttacatggcctgcagatagaaacccagaaccagggcttgggagagatgtgaagtctgtagatacaaatgtgatcactgaaagataaggcttaataagctagcaaaggcgagtgtttagaaaaagaaagaagcttgacaacaacccaatcttgagaaacaaaagctatttaagagactgtgagaggaacatgagtcagtaaaggaaacaaaggagttctcggtagtttaggagaacaactaaaaagttcaatgtcacagaaggaagttgagggaggataaggactgaggaagggctatttgatttggtatttaagggatcactgctgatctttaaaagatacaaagcgtcggccggccgggcacagtggctcacgcctgtaatcccagcactttgggaggccgaggcgggtggatcacgaggtcaggagatcgagaccatcctggctaacacggtgaaaccccatctctactaaaaatacaaaaaaattagccgggcgtggtggcgggcgcctgtagtcccagctactgtggaggctgaggcaggagaatggctccaacccgggaggcagagcttgcagtgagccgagatcgcaccacagcactccagcctgggcaactgagcgagactctgtctcaaaaaaaaaaaaaaaaaagaaagaaagaaagaaagaaagaaagaaagaaagaaagaaagaaaaagatacaaattgtctagtagcatgtagaggcagaaactgagttgcaatggtagcctaaattggaatggcatagctctgcactagagctcttgactggcaatactccatgtaagtattctaaagtcctgaacttgttcagtcttaatactaaccctttgaggtaagtactatattatccccatctcacatgtgaggcctgcaaggcctttccttcaagaccgagattattattatctgtttacagactaggaaactaaggcacagaagtctgaacaacttgcccatgtacatatggccaatcggcagcagatttggcatttggagccagcaatctggcttgagcatgggtgcccatttccccactactccattatgaagatgtgcatgtgataatgttagcttgcttttaagccatttggtggaaggagaaataacttcttaaaagaaagtaaactcagaacgtaggtcatgatctgggagatttaacaggaaatgacaatcgcaggggcaggaatgagagaaagcaggaggttctgacacgagagggttttgaaattagagagagctgaatttggcatgagatggtcacacatgtgtgtatattagttcgttggcttgctgtcttctttggccatgagctaagatgacggtgccaagtggatgaatattttcatgtagaagcatggcagacaggattcagtagcccacggagatgcctgggtcgttgctggaatgaagacttagagacagccctaggaactaagggcaagtgggaggtgtcaaagcaaagaactggtctttgctccatcctggcttgttgatcttttaattctttaaattttctactggggagggaaattatggaaacatgtatattaaaatttgtgtttgaatgatgaaagctgtcatcaaaattggcaccttaaagcaataatgtattctctgagcgattgaaggtttcatcaataaagagacaccacgagtggggccatctttttataaaaatagtcataatctatgtggttaggattaaagattgctctgaaaaacgtctttgcggaaaaacagtggtgagcaaaagcacaagttatattttggattttttttaattcacaggattaactaaataaggagtctctgccttgcttatgaacactagtaaacaaaatgtgttttcatttctacacatacttttaattgctgaacaaatctcatatatctaccagcaagccatgttaattcaatacttccacgtgtaacacttccgtttaagacaggtgtcttaattaaataaactaataattttgcaagtagaagtacaaaagcataattatctaatttgctaattgttcaactatgttaatttgcatacttgttagctacaacataaacaaatggtttgtatatgtatcgcctactgttaaaataatgaagccactcttgggagtagcatttttaaagtgtgttaataggtgccctataaaaaggactccttagttaaatacggttgaaaaatgctaggttaaagaaaattaaatagttttgtttctgcaggaggtctaggatcctggaatgagataatatatatcttagctattggaaacattgtgctctgcctcacgaactatatgtggaaccccctccccattttaatgggagaaacatcagatgctgtttgagagctgttttaacaataagttggtctcacaattttttctcatgagtccttccattcaacaatcagcagaaagggaggaaaatgactgaaagaggaatatgtttttgatttctgtctctggtctctttgtttttgtctctctctcttatagacacacacacagatatacacacaatgctctttattgatgcttatggtaaacacgcaaccctcttttgtccctttttattataggcatattgacaggcttgctacccttcaaaaactatgcagtaaccctaactgcttgcactttggctggctgtactgagagctcacatgcattgaacatctctactccacaagaaggtaaagtaatttcaaaggtcttgacttccacatttcagtcatgaataataaaataggagaagagctaaatgctacaaggccatttgctggcaaaccccaacctaatttgatgacaaagtgcattgccaggccataattgctccattttttgggggggtgcgaaaatgaatcaaactccataccctttaatgacatgcatctttaatagctgtaatgcagattaatgggctttttaattgctgttacattgttcatgcaagagccttgtcattaatatgaagcatctgaaagattaatgaaagcttcctcattttactatggctcagaagtaaatctagagacagtctgactaaaaagaattgattgtatggcacagtatgaaattgagaatcaaacggttgatttccatggtcttttttaactgctaaacagcagcacaggcaacaattatttcagtatgatgaaacctccaaatgccaattgaggcattattaatcactgcttagttccttccaacttaagtctcacttctgttgtacttggaacttacaaactgttggcataaattaaggtttcagaaagcatatgttaagaaggcagtgagaaagagaaaatattttagcacgccaaagtgaaagctttgctcaagcatcagaatgcatcacttcaagaaataacagctctcaaaacatttgaagcattgttacttcatatttctctattctggataagaggaattgtacatatcttatactgtctagttgaaaagttctttaggagatttaaacgcttgatctttagggaaaaagagtcagccagtctttctctctctctctttcccagtatctatatattccccccttcctcttttaaaccctttaccaagcaccacttgcactgaagatatgtaacagaaaggaagacatggacccataggatgaaaccaggacaggataaatgactttgtaaaatccttcttgtgacccttaatatgctgtattttttacctaaaccaatcagactcccctcacctgaactatgctgtcagtgacccagcctcagcattttctccatctggtctactggtaatagcactgtttttgttgtatcattgcatctgctgaggacatgattatcatcccctcttacaaggactttgaccagcctcaatatgggacaaatggccctatgttgcattattttctccgtatccactaaatcctttgtccagggtttacctggtacccttcataccaatttcaagctaagccccagagagatccctgctcttgtttatatttccttttttatttttaaagacattcccaaacttctaaatatccacgaagtaattctgaatttactaaatgatagaggagtttaggaaaatttaaaaaaaatgtttagttcttaggaccccccaattcattgacaactatataaaatacacagctctttttaaaaaaatatgcactaaagttttcatatgtaattgactaatttggttatgcgagctctggcaattcttatcattacatataggtttttaaaaatttatattatgaaccacattcaccagcattactcatctcagatcacaagctccttgaggctaggggactctatctgcttaatttgctttaataggtacagtcccacatagagattatgggttaatagtacttttggtggagtaacacaagcatcagtcaagtgaactagtgtaagtactcctcatccatcattgacacaaattctcataaatgtgggacagttatttaacactgttcctaaagcaattactgacaagctgcccacgaatcgggaatatttccatgcatgggatttcaggtttattccatgatttattggtttgggtctgaaaagtttgaattagaaaagtaaactaaaattagactctataaatcttttcttccacagccccacaagaggttcagccaccagtagccaaatcccttcccagttctttgctgctctcctggaacccacccaaaaaggcaaatggtattataactcagtactgtttatacatggatgggaggctgatctattcaggcagtgaggagaactacatagtcacaggtaagacctctagagttatcagcgaattgttatagtctatattcaaatataaacatacatatagttggctctcgatatccaggggttccatatctgcaaatttaatcaagaatgcttaggaaatatgtgaaaaaaataacaacagaacaattaaaaataatataaattctaaaaacatagtataacaactatttacatagcatttacattgtattaggtattctaaggaatctagagatgatttaaagcatacaggaggatgtggatagcctatatgcaaataatacaccacattgtaacagggacttgagcatccatgaattttggtatcagtagagggtcctggaaccaatctctcactgatattgaggagtgactgcacacacacacacacacacacacacacacacacacacacacacaccagataaatagagtctatagttatctgaaaatgtgtttttgaaattgggttgcttatttttatctcctgttaatcactccaattgtatgatcttgaaggtcatattagattcatggtgaaactgaagctaaaaaaatatggaaaagtgctcatgttacctccctccacccagggctgtcctactgtgtgttctcttctatagagcccaccaccccttacctaaatccttctagcaattacctttgctcagatgcagaggaggcctggaaatgcacaaatgtgctaagcacaaagagctcagcacatgacttctctgacttcagcagaccacaaggattgaaattgggagccagtgttttcccagtcaggctcacagtgtccagttggatcaatgacatcatcaaataaatgcctctctcacatgagctattagagtggtgcaaaagtagttgtggtttttgccattgacagtaattacttctgtaccacacgaatactttaaaatcctcactaatgtgtaatagtcttaagactcagaagtgtgactcagtgtggtttgaattttagatcttagaggaaacatagtatatctgcccatatcatattataaagtgtgatgatactgaaattaaatgaagtaaattcttgaaaaactttctaaatacagaagacttgcattatgtatgctgcctgtactgtgtttatatttgtattatacttatagtggttttgtatttcatattattttatatactgtatgtgactctcatgtgagacattattaatcaaatgttgactgatgaaaaaaccaaggcctagagatattaacttcttcataaaggtcataacaagttagagtcagaggtaggatgaattatttatgtattcactcactcacattaatgccaggtactaaggttgtaatagggaactggccagatactgtccctcttctcttggtgctcacagcttcatgggggcacatgtagatgctggagcaagtcgtgtggacagggctgtgtattcatccagttgcattctcaggtttacatttttttggcccccctctagtctgagaaccttaaaaggacaagaacaattacttttatattttattattcataattggatagaattccataatatttattctacaacataggtattattttacaccccaattttacaagtgaagaaactgagggaaagaaggattaagtaacccaaggtcacacagcttgagtcggaggctttggtactaacccaagcattccggctgtgttgaagaatgtggtcttaaaaacaagtgttttaacttgtcttagtttctgaatttgtaaaatggtgttaattacattttccagtattttaaagagaattagaactatatataaaatataacatgtcattagcaattggtaaagagaagttataattgttatctcctgtacaacacagagttcattgtaaaaactgaataggttaatcttactccaacagtatcttatggcatgattttaactaaaaattataaaccacagaagttatttcagaaaaaattaaatcacaccatggaaggaactttacatatattacatctttgaacctttacatatattacatttttacatatattacatctttgatgtaacatattaataattaacatacaaagcacttctgtgaccaagaggtaacattgcatgtaatgggatatcataacttttagaaccagaatagacatgtcctctgagaatccttttgctccccacgtgtgacacaggtatgccccgtatgcttactgattacctttatattacatcgctgctttttgtttgtgtcatcttgaataggactgtttgtttgttcatcggtttgccctgctgaaccataatgatcattaaggacacaactatatttgtttttttcattactgcatctcttggacctatcacagagtgggaatggaataaaaagtgttagagtgaaagaatgaagtcagatgattcctgggaataaaaacaagaagatagcaaaggggaactgatggaggataggattagggtaggaataaggcaatagagaagagagaaaaatggaaaagatacagccaggggaagagaaactaagaccccttccatgcgcctaaacgaaagctgcatcagtccacagggaagtggtgcagctaatggcaggtctcaaactgtgggccttgactctttccaaaatgtacagaactccatatgaggttacactggacaaaaccggaaaaagggcagtgtagggagaggaggaagaattcacatcaatttctaataccacctgcaaaatgacactgaattctgtattttgtttgtttgaattatcaagaacgccatgtgactataggccctgaagaaagattgtggtaaatggcaccatagtgtattattacaatagaagccccaaatataaagaaagtgaaatatttttaaagtgcctacatccatggtaatagattgattcttcaatggttttctatctttatgtaatattttaaagaatatatctccaatactacccatagcatttttttttctgctgtagctttcttggcatttcataagcaactatgttccttgttgctttcatctccaaatagtttaagatatgaagcatattgggactgcaatgctggtcaaggaggggaaataaactgagaaagttaatatggggttcaaagatgcacatgattattctaactttatagctagaaaaactgagacctagatgggttaagaaactctagtcagtaatcagaggaactaattcaaatgtagatctgtctggccccaaatcctctgcttttaatttctatacattctgcttgttgctcatattttattttcccttgccagaactctaaaagaaagaccccagaacacctgtattagtctgctagggctgccatgtcaaaataacaaaactgggtgactttaatagaaaagtatttctcacagtctggaggctgaaagtccgagaccaagatgttggcaagcttgatttgtcctgagtctctttccgtggcttgcagatagtggcctcctcactgtaggtgcacatggactttctttcaggtgacttcatccttggtattttttcctcttcctctgaggatgccagtcctattggatgaggttcccactcttacgaccacagattttatatcagtgatatggactaagttcaggtcatttatatttttaaagtttagctatctacagagactctcagagaagactaaataggaaagggactctgtctgtctgaagtcagcaagggagaaggctgtggagaaactgatctagccattgggatgggctttagcttctatgggcagtttaagtctacaccataacatgtatctatctacaatgctattggtacttactgcttgtctttgtgtcagggtatttgtgacatagtatcttttccacactgagtggcttgtgggtagaacttctattcatgatgtctggtgatttcaataatagtgtcagtttaggtctactaaagtggatctgtatagagctgaaatatctcttcatagagaaaccgagaagtggaatacagagtttactagatagggaaaataattgataatatctttaattataaaagtgataaattcttacagaagataatttaaaacatgcagacaagtaatacctgagaatcctgtcatattgaaactcataatatttgatggaattccttctactactttattcatgttaacaaaattgagctataacctatgtatgatattgaatacatattcccttattatattatgactatatcctatcattaaacatttttgtaaaaatattttgaaatgttttgaataacattatattccatctcatatagcatataatggatatttattaatgcatttaaccatttgagcaatagtatctaatctatctctattttaaatatcttgacatagatattcttatacataaatctttatttgctaggttcctagaagaatagctaaatcaaaggtaatgaacatttgcagaatgtttggtatagtttgtcacattattccaggaaagttgtcagcagtgaattttatattcttaaatatttgattattttacaaaaaaaaaagttattttattttaatttgcattttaaagtactagttatagtgaatacttttctgaataattattaaccttttatattttcctttcattcatctaatcacattcttgatgagcaaaaatttaattggggtaaggaataattttgagacttctccacgagctatcctgttttttctggttacaatcacccacactgtttaaaatgttttaccctctacaatatcagaaacttccctactaacttggtttaatgtcccctcctaaatattcaaagtgtcaacaatttttttctcactcctacttcatttacttgtagtttccctttaggtttccatatagaatcgacattcttcccgtagggtttgccagtggatcttgctgccatggggggcacaagcaaagtaaatgcatttcaattcagaagccacttagcatccaggtggcttggatttttttttcttctttttcttaaatatgaagcattaaaagtcaaaggcattgctgcaccttgagttagtacaaaatttattttaaaatgcatacagttcaaattttttaccttgcataggccataagctagtagtatggtgggtcagttctgacactgaaaaatgaatccagttagagaacctcccgaaggctgttgatgtttgctataataaatagcacacactttaagtcaaactttttcattctgtattcaaaggtaatggatttttcgtaaccatagtaaccttggtgtattctggataaatacgtgaggtatatacattctagttttatttttgaatataaactaccacattatgtattactaataatatgaaaaataggatgtaggttagtataatgacagcttaaactagtatgcattttccttctgcaaaaaataaatatttatcaaaagtataggttcaattaatttttctcccagttttgtggtattctggtggtgccatttatctttttttccaagatctccattaatctcttatttctgtcccataacagatttttaagaattttgaggtaaaaacaattgtactttaaagcttatgattaaaaacataatcgaaagattgaaggacctatattgatatcactagcagagctattgtgggccacttaagatgtgtgtatacagtacattcccaaacaagtagacaaaagaaatccttcatgagactgttcaacataccaggattgtttcaaagttcaggctggacagcacctgatcgatgatgactatccagactgtagccacagattattcttattttaaacgagcaccctaccagaaactggccgtttttaagaagtttataagatgtttccaaaaagcctacaaactttttagaaacaaaaatagcaagatggtgctaatcaggacaagtctccaccaaacccggcaaggaggtttatgcgagttgtgcttcctagttagaaaatactacctgaattgcttttggttaagccaacctaagccattgctgtggataatgactagaactccaaaagaggaaaggttaatagggacattatagaaaaataacaactatctcacaccaagccataacacgtgtgttttcaaatgtatcatctgataaatctacatagtcatcttatagttaaataagagtgactgatatctagaaccatagatagtgtcttcccactgctgttccatcaggacctggatttctatcactaagactgaggcagtaagatatagataatagcaatgtaatgagtgtgtgcatgcgtgtgtgtgtgtgtgtgtgtgtgtgtgtgtgtgtgtaattgagagacagaaaaataaagagagggtagaaaggcagatgtgggcagggggaaagagggaggaaaagtggatgaattctggtaaaatcatataggcaataattatttatgtctaaccaactaaaagtgctaaaactttttttttggtcttatttgccaaggtcaaagagaactatgtgtaaatagcaaaatagaaatgctcatcttaaactttccaaacacttaagtcttacgatgggaaatttattgacgaagaagctgtattgcttatggcacaataaaaacacatttaaaggttaggcacttctatccgagcgttataaggaaccttatcagcactctacaaatttgagctaaattatactcattcacaccaatggcttacagaagctcttttcttagcaaaatagaattttactttaacctagatattttctttattttgcatatttaaatatcacattgcagtacattgaaataactcctcttacataaaaatactattacctaaaggaatgctgttaacacgcctgtgttctgttacaagctctaatattaataaagcagagcatgtgaggatttccaggtaagatgacggtctcatccatgagtcaccatgccactctattacaaacgaggtcataccatgtttccctttgatgtctcagtcatatagtattaaattgtacaaagtctgagaaactttaaggacacgaaggaacaaaagtcaagctatgcaataagtagagccttcaaagccaaattactaagctactaactctgtgaccagagactccagaatagttgttcaaggttgttctatataccagatctttgggttaatgaacagtggatgctatactctcaagagtcttattcatcgagcaacaaagggtcaaatgaaatgaaataacttgtacagaatgtttgaatatcagttgtggttagctgtaaacaatacaacctaagtgtcgttcttccattaaggtgcttctataatgcacccgtatgtgaagaaataaaatatgtttaaatttacattttaagacccgtacccaaatattatatgatctgttaacctaattaaggaatattatgttcgtaaatgatagggaaagattctatgcttaaagggattttagaagaatcatgggaataatattcagttagaaaagcaatggagttaaatgctggaaagataacggaatatgtccttcagttgaaagtgttacaaatagaggtgtcctgttattttcagcattttgagagttgctatgattttttatgtacgttttaaagtgcttaaattgagttataaattaatacagaaaagtggacacatcttaagggtacagcttgatggatatttacaaaggaaacacatctatggaatctgtacccaaaacaagaaacagaacattgtcagcaccctgtaaagctcctcattttgtggcctcaaatcttgactcaggtgattgctttcctgagtgttgacaccataaactgattttgctaattttgtactcaatataaatagaataagaaagtggagggggggtcttcaaaaagcttatggaaaatgcatattatgaaaaatgtgaggatttcaattttttccaccaaaataaactcatactaacttgttataacattcctgaaccagatctagtttgaggtggtaagaaagttaagacatcagtctgaaacaagcccctaccagggcaacatgaattcagtaaaattgaagcaaggacaaatatcaaatttctggtgaagcttgcatagaagaatagtgaaatcattgatgttttacaaaaagtttttgaggacaatgccccaaagagatcggcagtttacaagtggataactcattttccttaaaggacaaggaacaagacagtattaaagatgaagcctgcagtggcagaccatccacatcaatttagaagggaaaatattcattttgtctgtttcctaattgaggaagacaaacaattaacaaccaacatcatacacatctcaattggttcactttgtacaattctgactgaaaaattaaagttgaggacattaaacttagcaagctaacataggaacggaaaaccaaataccacatgttctcacttataagtgagagctaaatgatgagactcatggacacatagaggggaactacacatactggggcttttcagaggtggagggtagcaggagggagaggattaggaaaaaaaaaaaactaatgggtactagacttaatacctgggtgatgaaataatctgtacaccaaacccccatgacacaaggttacctatgtaacaagcctgcccttgtacccctaaacttaaaataaaagttaaaaaaaagttgagtgaactttctacttagtgggtgccaaaactgttgcacccagatcagctacagacaagagcagagctttcaatggaaattttaaacaggtggaatcaatatcctgaaacattttatcaaataattgtaataggagttgaaatatggctttaccagtacaatcctgaaaacaaagaacaatcaaagcaatggctactaagaggtggaagtggttcactcaaagcaaaagtggaccagtcaagagcaaaggtcatggcaaaagttttttggggatgcttgaggcattttgcttgttggttttctggaggaccaaaaaacaataacatctgctaatgatgacagtgttttgagaatgttagccaaagctttagcattaaaatgcccaggacagcttcactagagtccttcttcaccatgatgatgcccctgctcattcctctcattgaacatgagaaattgtatgacagttttcacggaaaatcattaggatcttacagttctgatttggttccttctgacttcttttcgtttcctaatcttaaaaaaatctttaaggagcacccatttttcttcagttaataatgtaaaaaagactgcattgacatggttaaattcccagaacagtcagttattcagagatggactaagtggctggtatcatcacttacaaaaatgtcttgaccttgattgagcttatgttgagaaacaaaggttatatttttattttttaattccattttccatgaaatttttgtagttcccttatatgttctcttttgtcactgtctttttcttagagatataggagggagagtaaatcagtacaacaattttttgtgttcctgtacctacattcagaaccctctgatctacaggcaattgctaagatgttgttagttgttaaattcctgtcttccagaaagccattggaaaatttgcaaactgaaacatctacctctttctccaagttcagatctagaaaataattatagaaatgcttcatctgtgcaattagaatttagcacatgaagtcactgacccgtgtacactagcaacaaacaaaccatataaaccattctgagtttccaacaatgtaatgttgtgtgaccataaagtttatgatgctgtagaaaaatatttaatttggaaagataataacaacaaatattttacacatatttgagtctaattcgttaaaatatatgtgtatatacatagatacatatacatggatgtgtacatatacatatataggtatgtccccatatggacatataccaaaatactaatagtgattatctcttaataatgggagtctggtattgcttttttttcttttccttgagagtcgttcaatcttttaaattctctacagtttggatattagaagtcagattctttttgtaatgttattcccaattttaatatatgtgataaaattgatagaaaggaaagaaatttcgggaacctgactacacttaaccattaatacttatctctagttttccctagtcttcaccttatatttaatcaggttgatcgtcttactaatttccttctagccaataccatagatgacctctagcactatctaccaccatcaaaacgttatgtatatttgatgatctacctcaattcccacatcttcatttgactcatagactcttccatatcaaattcctacacatttgtcatttggacacattctatcttgcaatattgacttattttcaaaggagtaaatcttgattaaaaataagaatgtaagtgcattggttacagttattatgccattatttattttcaaaatttctgtaatatctcacataggaataaggacccaactggcatccaacaaactcactgaattgagtttaaatgaattaagttgaaaaaacactgagactcagtaaattaatattttagagaaaataacaataaataccaatgcataatttggatataattaacatgctaaacttggtaaacaattttattgaggtaggctttcctgtagcttaggatttttcatttaatcatccaatatatagcaaatatatacaaatatttgttgctcaattatgtgttttagcttgctaagactattgtaacaaagtaacacaaactagatggcttaaacaacagaaattgactgtctcacacttctagagacagggagtcccagatcaagatattggcaagactggtttcttctgaaggctatgaggaggaatctgtttcatccctctctccttgttttggttgtttgctggcgatatttggcatttcttgattgtatatgaatcatcccaatctctgccatcatcttcacataatgttttccctgtgtgcttatctgtgtacaaatttctcctttttataaggacactagtcatattggatttgggcccaccttgttgagctcatctgagctaattacaactgcagttctagaggctaggacttcaacatatgaattttggggagaacacaattcaacgtgtaactctagtgctgtgcatttgatgctgtgattaataacattctaaaactttcctgaaatacctaaaacatattagagaatttaaggtgtgtgttcacaatcagttttaagatggatatggcccatgacagtaatgaaaatatttagaaaaggtgataatcaattccatctggaatgctcccagccttactttttgcatcttcacaatcacatctcttacttccctggcttgctttctttgattctttataggagtgattagtttcctagtgctgcttaatacaatacccaaaatgggatgccttaacacaatagaaatgtattctcttgaagtttgagaggctagaagtttgaaatgaaggtatcagtaggcccattgtctctctgaaaactgtaggggagaatccttccttgcctatcccgccctccagtggtttctggcagtcagtggtattctgacagtcagtggtttctggcaggtgtctgtcagtcagtggtatcctggcagtcagtggcttgcagttgcgtcaccccaatctctgcttgtatcattacatagtgttttcccttcttctaaagttctctcctcctctaaggataacagtcatattcaatttagggctccccgtctttcagtatgacctcaacttaacttcatgacatctgcaaataccttattttcaaatgaggtgacattcacatgtacagggagttaaaacatggagataccttttgggaggacaaaattcaatccactacacctccattgactccacaactactttgccactcagttgaaactgttctcacctagattgtcaatgttctggtagtctccaattcagggacagagtggaggttgtataattcatgatgttttattgatgattcctccatctcagaacattcttctcttggtgtctgtgatacctcaccttctcaattttccctattactgttcaagctctggtgtgatctcttcctcattttcttccacgcacaaatgttggtttcccccaggattcctcttgaaacattccacacaatctccctttgaaaactcagtagtccttgtcttcagatatttttcctaagccatgaacatttttctcactgcatattgggcactcctgctacaagtgtttttactccaactccttaaaactgaatttattttatctgccacatcctaccaatgtgctcttttttctgagttttttatctttgggaaaagtaacactattcattctttttcccaaacaaaaacccagcattaatctttgattactcctccttcatccttcacatccaaacttttttgctgttcttgttttaagacagggtcttcctgtgtcacccaggctggatggagtgcagtggcgcattcacagctcactgcagcctcgacctcttgggctcaaatgatcctcttgcctcccgagtagctggggccacaggtgcatgccactacacctggctaatttttgtagagatgaggtttcaccatgttgcccaggctggtcttgaactcctgagctcaagagatctgcacatccagtcttaaaatccaaactgctgttgccctattacacttatcacctggctcctatctactttcttagccttatatcattcttttattctcatttatttctacaacactacattggttttctatttctgttggtttgttttgtgaaataccacatgccttttcctacatgcagacttttgaactttctgttcactctgactggaatttactttccccagttctttacatggctgaatcattgtcttccttgagttctcagatcttataaaaccttctctatatttgttagaataacctagatgttataagcatacacacatatacatacagagagatgatagtttttaatagtgaaaacacaataaaagtttatttcttgttcacttagcattgagtgcatacaaagtttggtccacagagtttcctttttctgcacagtcattcaggaatgcaggcagatgcagattcagattctgtcttatttaacacatgacttccaagggagctctggagttatttccattgctacagcagatgaggaagaagattgagagatcatcatggcagattgttatgggccaggcctgggagtgaaggtattaaagcaataccttgtactaactcaaagttctgtaaatcagaaatttgggtggatttaattgggttcgtaattagggctttacaaggccaaaatcaagagttggggcagtttgggctctcatctgaaggctctgggaaataattcacttctagactcattcaggttgctggctgaattcagtttcttgcagtggtaaggccaaggtccctgtttccatgttgcctgtcagtcatgagctgctatcagcttctaggggccacctcaggtcctttcacatggctccctccatctcaatgatggaggatatccagtccccctcatgcttcaaatctctctgacttttgcctccagctggagaaaacactctgctttaaattgctcgtagttagtttgcacccaccaggattcatttccttttctccatataaggtaagataatcataagtgtgatatctcatgaaattcacagattccacccacactcaaagggggaaaattgtatataggtgtgtgtcactgggagtcattcttagaattcttcctaccacaggttcagaagcagaatcactcaagcatggttcttaccctgtgaccttactaagccttggtttcctggtagaatggtaacaacagtacctactttagggatttagtataaaaattaaatgtgatagtgcatataaaaagattagcataggtcccataactcttctaaaaatggtaaataatcaacaacccatgctattagtcgcagaaataaggaaattattgttatatcatcataaatattcttaatgcaaaacatcctctgcatgcaaaaaaaaagcatgtctctaaacttcatgttcaatttaactcagaaaatatttgttgagcaggtactatgtacctcagaggttagaagttatttataaaactaagatactgtcattcttcctcaaatcattcccagttcaattgcttagacagaaatacataaaactaaatagaatgctgtccaacctgtggtaaattctgtaacatgtgtgacaacaaaagagaagggttcaacccagtgtggaagataaagtgtcacagaagaatgttcacaggctttagagtcgagtttaagaactgaggaacaggcaaacataaggaccatggttgcgtagtcactagacacagaactattaatgcgcatttcacaaaaattaaagagggaagagtttaatatgagtgtgcaccctgggtaagtaatcaatagtgagaagcaaggtgggattgagattatcaaaggtgctaagttatgttgagatatttgaactttgttctgaagcaagagagaaccattgaaggattttcagaaataccacaagacaatcagtgctttagaaaacacatagttggaacatatcattgcttcaacatagcgaagactgagtctgtgtagctgttttctccatttagcaggcataaggacaagtgggttagaacactaaatgcaagaagctaattggacttaacaatacagatggcaaaaggatgaggagaggagagaaacgcattatgtttatttgttaacagctctattgtattgtatttatatgcattagtcagtgtaaaataaaatctgcttattttaaatccttttaaatagtgtttaaatatttcctgatgacacaatctgctaaagtatttacccttggtgcagatttccattaaccttgctgtagatactaagcctacaaccatatatttatagggggctcaattatggggtaaagcctagtgacatcattataaaagcacatctggataagctttagggtctttgtctttctatctgatttaggaaatttagtaaactgtaggagaataccattattaacagcccctgaattctcagattatgaggatgtcctttctctcaaaataaaggaagagagggattaaaatctctaaagctgtaaatgatatagagaaatgcccagtacacagatatcagggatattaggggaatccagttgtgttggatatacaagaagaaaaaaaaggcagaaattaaattcaaagtattctttcctcatgtcttttgtcagtttttttttattgttttttagagagtctatataaatcctttggttccctaaaggacaaaattcctttgataattttacaaattcttttctaaatagtatctctgtattgtagattaaaaaaattaatacctaggaaaggtcaggtcacttctttcagtcaaggaatgactcattcatgaaactggaaagaaaacttctttttcactcaccccaatacttgatagctatcttaaattgaatatgtctttaacagtatatttgatattatcagtgtattttgatttatatatatatatcgtatatattatatatctgtgatatatatctatatatcatttatatatctgtgatatatatctatatatcatttatatatctgtgatatatatctatatatcatttatatatctgtgatatatatctatatatcatttatatatctgtgatatatatctatatatcatatatattatatgtctgtgatatatatctatatatcatatatattatatgtctgtgatatatatctatatatcatatatatatctgtgatgtatatctatatatcatatatattatatatctgtgatgtatatctatatatcatatatattatatatctgtgatatatatctatatatcttatatattatatatctgtgatacatatctatatatcatatatattatatatctgtgatgtatatctatatatcatatataatatatgtgtgatgtagatctatatatcatatatattatatatctgttatgtatatctatatatcatatatattatatatctgttatgtatatcatatataccatatattatatatctgtgatgtatatcatatatatcatatattatatatctgtgatatatcatatataccatatattatatatctgtgatatatatcatatatatcatatattatatatctatgatatatctatatctctctctatctatctatcacattttctttaaccattctatcagtgatgggcatttaggttgattccatgtctttgctatcatgaatagtgctgtgatgaacatttcttttgatttttattgtctgtgttaggacatcataacagggccctcctaataccattaacaacgcatcatgaccctggtaatggttttgtagctgaagtctagatagtttaagtgccctatcttattcatttgtacatattcaatatatataataactactattttctggacgttaagagaattgctgaaaatacagtggtaaactgcaatgaccctatatatcctggtttgtacactgttttatcttctgtttcagttaccttgcttaaatcttgtggctatatgacactaataaaagttaccaaatttgtaataaatagcatcacaaatatttcattgtgcttgagattgtttcaaaggttttgatttttctggctatacacacacatatgtaacataacataattaaaaatgtaatgaacatcactagactactagttaaacaagttatggctaataactaatatgtacacaaaatatgtggacacaatagaacaagcaaatctttatcaataggagaatatcttcaaagtgtatattgtaaagcacttgtgcagaaaagtatattctatattctgctaatgtttatttgtttggttatatgtatgtagactacatctggaggcatacatataaattcaataattgctaaattcctaggagaaaactgggtaatagtgacacaaaggtggagagagtcttaatttttatgtaaggtcttctgtacattttggctatcgtaccatgaatatatattaatgcattattcattcaaaattaagtacaatttaaaaataaaattactacaaaatggtaaattttaaatgttaaagaaaacttggaaaaatataaagaaaaattcaaattgtccacaattttatctaccagacacaatcactaattatattttggcttatgcatttaaagtctgtttttttattattaaagcacagatacaaacatataattgggaccagactgttttacaactttttaccactttataatatactaagcttattaccaaattgcttgctcagcattcttttatgtaacattttgtgtatgtgcattttaagttttttaaaattaataccacaaatgtgtttatgcattatttaaaatgatatattcttcttcctattttgtaaatgttttaatatatatgaaggatgctaaccatttgcatgcactctatatgacagttatttttttccgctttgtcttttgtatttttttactttgtttatggtggtttttaaattaagacatttttaaaacttgtagtcaattcaaatttagatatattttccagcatagtgtcttccttaaatagaaacacttagattttcttcacttcaagaatagataaatatttcctgagattttctttgataatttatactttcaaaaatattttcacatattccagcttctgtgaatatttttatttatttatttatttatttattcatttatttattgagacagggtctcactctgtcgcccaggctggtgtgtagtagaatgattttggctcactgcaaccccgcctcctgggttcaagccattctcctgccttagtctcctgagtagctgcgattacaggcatgcaccaccacacccagctaatttttgtacttttagtagagacagggtttcaccgtgttagcccggctggtctcgaactcctgacctcaagtattccgcccaccttggcttcccaaagtgctgagattacaggcatgagccactgcacccggccacttctgtgaatctttaaattacccaatgatgtgtataagggttcaaattttattcccattttctcagtgaagaaatagagattctgaaaactgatttgatatgcctgaaatcataaagttagttaatgtcatcgctaggactagaattttggtgcttacacaatgtgctgactcccaaatcgtaaatttctaccagatgtttaaagtaaaagaatgatgggaaatttcattaaactattaactatattcagtggtttcaaaatattaatacaacattgatatctttagtgcattatcaatgtattcttggagacaacatgtcaattaaattgtctcttattcaaatgttaacttcagtttttaaaatttaaagctagtctgctgattttcaataagagctgtctaatattgtgaactagtgaatttgaggagataaaagtggaaattataggtctgcagagtgtagcattgataaagagggggccatttcttccaagtcagtaaagaaaagtgatgaaacataaactggaatttttgtgattctactgttgcatgaccttataacacccctgttttaattaactacggacctgaaataataacgtatatttctaatccactcacaggaatggtaggtatattagttagctagggctgccatgacaaaatacaggctgagtggcttaaacaacaggaatgtattgtcttacagttctgggtgctagaagtccaaggcaaaggtttccataggttaggtttcctctgaggcctctctccttggcttacaaattgccgccttcttgcaatgttcttacgtggtcttttctttgtacacgcacaccctggtgtctttattcccatccaaattttctcttcttataagggcatctgtccgattgaattaaggctcatcataatggccttattttgacttaattacctctttaaagaccacatccccaaatatggttacattctgaagattagaatgtcaatttatgaattttggacggacaaaattcagcctatagcagagggtctgctttgcaatgattatgcactattactcaccaaggtagtaaaaattaagcaaacatttatatacacaagtttttgaggggataaagcctacagaatataagaacaaaatattttcaagaatgcctgtctgtggttctttcattaattcacttcttcattcatctttattgagtacgataatgaggcagggaaaatataaccatctgactatgaattgacctggtgcttgtagacatatgtggtttaacagttttccactttgtgtacccctctctcataacatgtagcatactctgctagaattattgattgattaacctcattgtctttctcactagatcatgagtactttgagggcaggaactttatctttcatctttcatcctgaagacatggatcagcatatgtgtatagtaggagaacaataaatagttttcagaatgaaggggagaattaattttttcatgaaaactagatgtcattatgtggagaatttatcagaatgccagactggtaaggatgttcagagacacagtagttgacctaagactaacctaaatctgtttgtatcacagaagtgtaccaatgcttgacatacattggataaaatgtttatttcctatttctctgtattgtttggccacatgactattgcaaagctcataagcacaaaatttgcacaaaacccctgagagatgccatccatggctacaaatacatgttttgattatattaaagtaaaaaaattgatcaattattttaaatattcaaggtagttaagtgaataaattctatgtaattacaaccacaaggttggtgcatattttagaaataaatgcttgttttactatgagaggaaaactgcgaatggcacacgacctaaacaagggcatcctgtttgcttggatgaaaattccatccccatgtttactataccttccactctcattcaaacctagaacaggagaaaaatagttcgagtttaaaaacaaatccagtagagtttaggaaagtttgtctcgtataccacacctttaaaaggctattttgcaatgacaatattcttgtattgccctctctatttttccctccctattgtatacatgagcccagcaacttctagaatatactagcacatatgaaatttttgaatatctatttcatgtagggagattagaaagtcactttctgccacttgtgtagctctattatgcaaaaatcaagaggatgcagatcataaatcccattagggtggaactctggatgtggaaaagactatatagataattttaagagatttcccctcagctgaatcattgctataaagttaagcatggtttttaaaatataaatcaaataaatggtttctataaaggcacatacctttactgtaaactgaactccaacaaacttttgagtggacatttctcaaatacagcatctattgaaaacttcctctgaaaaaacatttcataaaaattgaagcttgccttacatattttcatactatgtggttttaatgaccgttgtattccactctatcaccataaataaatatgtgactttaaaagatatgttgtaaataaaattagctcgaaaatactaacactaaccaaacattaatcacagaatttaaggagactatcagagactaattcagaaaataaaaatattgtaaaattactaccatgaaagctctaagaaaagttcatgataatttcagtgatgctaaggctacagaccaaatataaacttagaaacaaaagtatttagtctaagacaaattaaatgtgtatatattaatttattttctctgtttgatgggcatagaagcccatcaatactctgaatttatattttattaatactctcacaatttactttcatatgtgacttactatgtaatataaaaaacaaaagagcttgaaaaactgagatcagagggcaacaataaaatattaatgctaatattatcttgaatttttatctatacatatttaaatgttgttatcctcactgaaatttgttactaatcagtgaaactttagtatttacctaaattagttcttcttataagtagctcaatctccataataggagatagactataatttgtactttagcataaatattcttctaaaatcattcaccgttttatattgtaattgactgaaacaatataaagtggcttaaaatcattggtatattataaaacctatgtcagataaaacatggcatctgtgaagtttgggaattataacccagaacagtgtataattcaaaacagatacctgaaattatcttgtacacatctcgctatctgctatatctcatcacataaaatgcatagtagatgcacaaagtagctgtccaacaaatacttatggaattaataaatgaaggaatgacaaaaatgcttttcctcaatgtgctaagtcaaatacatgtttccttttataaaaatttaactatatgttttagatttagttgaaaaaatctatactggaatttacataattacataatacatattttaaagtattattcccagtatttatgaacattcattaatgagaatggcttctacattaaaagatcagttagcctctgctatttttgataatgatttaaacttgttaattcttacctgtataatgcattctcctttacaaaatgctggtatggccacttgttttatgttatcctcacaacaattgtaggtatagatgtgataaataatatactcttcctattctgtttttctttttaacaaatgagaaaactgaggcctaaagctccagtgattcactcatgtttacacaaataactctaaactggcgctcagctcttgctaattctttgtctcctcttttgttttgtttttgtttcattttgtttccctaaaccataatgccatccaatattatttaaagtttgcctgcctgcttttgcaatggttcttagctttccacaatagcaagtgcatcaaagaagaaaaaggaaatgattatatggttattaatcaaactcagatatggctagtaccacctttataagtgaaacttatataacaatctcagtttatgtcagtctcttatcccagtgtttaaagttttaaggactgagctgggaatgtgaggaggcttttgcttttcattttgtactctactagttttaatttttcactatgtgcatacatctgcaccccaacctttaaagaattagtttcctgaaaaaaaaggaaaatgcaattcatcgtacaaataaaagcataatcccttttattaatttttagctaacaaacacataataccatcctattccaggtactgtttttaaatgacttgtatctaaatgtaatgttaacgcatactttcgatgtgcataaatatagccaagcagtcctaaattcagataaattatcttccatctactgtatataattatatagtatttcctaatttttataaaatatggtttgtgtgtatgtatactgttactcaaatgaggttttgttgtttttctctcctcaaggtcaaaaacaatatctcactctatcttttgtgtcttttgttttttgatttttttttttttttttttttttgtctgctttgaacagtttttaagaggaaaagaagaaaaggtgtttgggggttacataaaaaaagggagaaagagacccaaatctcctgtctcttttatcacctacaaactgtattgattttcactttcctttcctaaatccatgctttaaagacattgtccatctaagaaacatagagtcccaaagcacaagttttgatgtagtgagcacccattgattgtaccttgaagtggatgtaggtaaacagatgacagatagatcaggtagatatatagatatagatatagatagatttatcttgaattttcctagatcccattaatctgaatgtacaaataagtctcattagttctaatatttgtatttcactgcctcattgccctcacctgctgtagatgatctctgcctccagcaaactaatcctcatgcatttctggggagtccatatgggttttctcacttgcacttaggatcaagctggacaccaattggctaagtgccacggttactccactgggcatctccatgtcccttctctggataaacaccatcatctatgggcataaggagcactgctattcttccattgctgctccaccaggtacctgagctctcccactgctgtgccaggtggaatagttttccaccaggggccaccttagatattcctcgtcaggtgagtaccaggactgctttgctaggtagagctgtcccagtcgattctaatatgcccctctgctgttatatctgtatcactgttctgtattctgctagtaccaaagctgaatgagactatgttaaaagtagtggtggaaaaatgtctttcttccttgcctccctctttcttaagtgagtcctaaaagaatactgagtagattttggtatcttaaaggtttaacaaaacagatcttctttgttttactctaaatacaaatctgagtaaactagccaaggctctcagaatgatctctctcttctgagaaccagggcaccatacctggctccgatttctctcatggtgaattcttcaaaatgttttccagtgcatgggctttcgctgggttatctcccacgttgttcacaatgttcagagatatctgagttaacagcacacccagaggtgttccctctttccatgactgtcccccacaaccccacgccaagaatgccactccccagttctaatggcagtatgctgctggtagcctggccacctgtctcagtccatttagtgttcctataaaggaatcacccaagactgggtaatttataaagaaaagaggtttaattggctcacggttctggaggctgtacaggaagcatggcagcatctgattctgaggaggcctcagggagcttttactcatggtggaaggtgaaggggagcagatatatcatgatgagagaagaagcaagagagagagagagaggaggaagtgtcaggctctttttcaacagccagttcttgtgggagctaagagtgagaactcattcactcccatgagaatgatgccaagccactcatgagggatctgaccccaagatccaaacacctcctaaaaggctcagcctcaatgttggggatcaaattgcaacatgagatttggcagggccaaacaaaccctatccaaaccatagcaccacccaatttgccagatatacccaggcagatctaaatatatcttacactcacaatcaggtcctccttttatgagataccaaagatgttccattagggttctcagacaaacagaatggagaaagagagatttattgtaaggaattggctcacatgactgtgggagctgacaaatctaaaatctgaagtctgcagggcatgttagcaggctagatatccagggaagagttagtgttgtagtcttgggaccaaaatcttcagggcacgtattagtctgttctcacgctgctaatagagacatactcaagactgggtaatttataaaaaaggaggtttaattgactcactgttccacatggctgtggaggcctcataatcatggcagaagagcaagagatgtcttacatggcagcagacaatagagaatgagaaccaagcgaaaggggaaacctcttataaaatggtcagatcttatgagacttattcactaccacgagaacagtatgggggaaactgcctccatgattcaatcatctcccaccgggtccctcccacaacacgtgggaattatgggagctacaattcaagatgagatctgggcagggacacagccaaaccacatcagggcagatgagaggtttttgttcctcatgacacaaaatgtggtgtcttttccaacaccacttcttcaattctctgacactcactaggcatgctatagttcagctcagttctgacagtaactacctggagttagagtaagactccatagatttaagagcccagtcccacaagactaccttcccttcagaggccaggcacaagtattgagtccccactttagccacaattctctccagctgagctacacagtcttgggttcccacaaccccctcttcagggttgataatttgctagaatgactcacagaactcaagaaaatgctctacttactattgcagtttattttaaaggatgcatataaacagccagatgacaaacctcctcaaattctgtttaggggcttttaggaggtttcatgacataggcatgattgatcaaatcattagccattgatgattgactcaatttccagccactccccttctcccaagcggttgctgattgagtagtgaagctgaaagttccaagcttctaatcaaggtttggtctttctggggaacagcccttattttgaagtagtctaggggccgtctgacagtcacttaattagaacaaaagatgctactatcatctttatcactcagaaaattccaaggattttaagagttctgtgccagaaacctggtacaaagaccaaatatcttcttatatcactgcaggccagcagactggaaactcccatagaatttttatcatgcagtcttgaggcagaattctttcatctttgggaaatttcaatctttgctctaaaggctttcaactgatcggatgtggccaacccatactatgtagggtaatttacttaaagtcaactatctataaataaatgttaatcacatctaaataataactttatagcaacatttagattggtgtttgatcaaacaagtggataccatagcctggccaagttgtcacacaaaagtaaccatcacagatgtattattttatttaaaatcatcagtattatatgaattaattcagaaataaaaaaggtgttgtcatagtgtgaacacttataagtgtctttcccacagaaatgtcaacagactgtgatttgaaaattgctgttttaaaagagaaaagctcatcattctacagaaatgattcaaagatagacaatccattaaatatcttataatgggccaaatactactagttgttaatttacacttgcaacatcaaacactttaccagctttttaacatgcaactgttgcatatgatgcattgtgttttttgcaagtaggtatacagcataattctaataggatatttatttacaacctaaccttacaatttaaagtctgctactccattgtgctcatcctacccgctgtcttcttatattcaaagctattaaggagtacttgctcagcatatcactccaaattaaactgcaagacattttatgatgaattaaatgggtgacgctctcccagcctttgtaactactagagcaagtatccaagaagcagacaattttatcacaaaattctgattgccaagttgtttttattaaatagacatacagtagagaatttaatcttagaaagcatctaacataaacacagatttctcgttttatagatgaataaactaagatccaatgagggcaactatttttttccaagttcatgcaggcagctaacaccagaacaaagactaaacaaagctcttctaacttctccccccatttttatcatccattgcattcattactacaaaattactacaaaattattagcctggtctttaatggtggccccaaagaatggtttttagtattacttccttcacttctttcgtatgtcctgtgctccagctaaactgaactatgttgaactaagctaaacatttctccttaagcttgtactgcattttgctacagtctttttgccaactcttcccatccagaatgtcttcactctctatctccactgctttaaaacctaagcaattttcaatttaagttctatctcctttttgaagtattgtatattcttctagccagataaaattctaggaaaatattgtcatacttgactgcataaagatttaaattgtctatatagcaaaataaaaccattattgaaatgataaaacaagtgacaaactagaacaaaatactttatagcatacttatttaataaatatctattgatagcttgctaagtaataggcactatactaggtgctatatccaagtaatgttgacttattagctttcaattagaaaaagagaaacactattagatatgggtcaattagataaacaggcacatccaaaaagaaaaaaatatgtaaatatagtcacagagataataataataataataaatgagatgctacttaacatttttcaaatgtgtaaatattttttaaaattagatttttccatattgattagaagatggagaaaagagctctttcacataatgctgctgtgaatgaaaattggcaatttatatcataatgtgccacagttttgttctgtatggtctcaatcccccctgtaaatgtgtgctctacttttctctaccttgtcctgagctttagcctctggattctctttgggttctgccaacgtaagacacaataaagagaacaacagacaggagggaatgaggccgaagtgtttattcctcaggctctgtgcttgcaagggtccccaggctctgtgcttgcaagggttcagatgggcagtagctgttcctccattgaggggaggcccttcctacagtacagctgtctttccagctggatgtggtcctcagcctaaggcagcaatggcttggtctgtgtttagccactagctgcgttcttattcttgaatgtgccccttaagcctggcccaaatcctgtaaatagtccctgacatatttctcttcaataattccatttcagtgtgccatcttctcccttgtcaggaggaccccaaatgatccctctttgactgggaaattctacttctaagagtttatgcttaaggtgtaattaagaatgtacccaataatacagtaatccatattaaatgttataatagtagtaaaaatgacactagtgaagcacaaaagagaaattaatccaaactgaaagagtttgagaaggtttcttatagggtgtggcatttgatttgtgtcttaagggtagcatgagactatgccaaaaaagaaatgtgtatgtcttgccacccaaaagagatatcttggccattgaggatagagattcattactttcttatgctatataaggcgtagtatagggctaggttgaaatagtattaaaataatatttaaggattgattataggttttcattgagaaccattctcaggtgatactttactaagctgacaatagacttagcactgcctggcaaacagcaagtagcagtcagtgatatagccatgattattactgaattaacagcatcttaatcttcactacgatatttgaaagggaacactgattcataaacctactcttttcctgccacaggtagtcaggaacttattattcttattatgtctcattattaacttctgttgcctaacaagatattatatattgtatgtcacatgaatattttcttacaaagtattaattgattcctaatcttgttaaagaatatgatagtagcaaatatccaactaattctgagagaaaaacctccagttttgcaagaaagatttagccaagttatgcaactaagtttgttcaaataataactctataaagttatctcgattatctcctctttagtttatgaatcgaaagcattgatgaagatcaaaagctaactgatgcctccctaattctatatctatccttgtgcagaggcaaagtaggggagtcagtaggatgtttgtgtgtgtgcgtgtgtgtttttgtatgtgtgtgtagatggagacagagaaccatagcaagatagagagagaacacgagaggagactgagagagaaggaaagagggaggaagggatggatggatgaaacgaggggctttctctcattttatatcataaaagtaaccaagaaaaaaatcctgggttcaatattttataattattacaaatggggtattagagatgttcaggaagccagagtagaaggcagctagctaagaatgctgtcagcctaaggagtttttcatggacgcctttttattctaaccagccacagaagaaaagagggaaatgaagaagcatcatccttcactatcacaactgacaataagggttctcccttacctcccacccccgcccccactacacacacacacacacacaaagtagtgactgaaaaccctcagcaggctgggctcccctaccacatgccacctgctgcaaatgtgttggaggcaccaggtcctcctttcttttttgccagttttcttattgcagaaaggttttactattcaacaattaggagtgtccaaggtgttaggggtcataagatacatccttgttctcaaagcgcttataacactgtaactactgatgactggtataaggatgcttacaagagaaatttattaaaagggcaactcagtagagtacaaactacgcatatgttgaagagagtcaggagatgtttcatggataatgcaaacattgaacagggttttcatgaaagggagggatgtggatttctctgataaggtggaaaacataagcacaaatggaagaatttgttgagtttagtatgtggtttgtgttcagttttaaatataagtccttatcatagcaaagcgatttcttttctttttgtttttgttttttccttttttaaattattttactttaagttctagggtacatgtgcaaaacgtgcaggtttgttacatatgtatacatgtgccatgttggtgtgatgcacttgttaactcgtcatttacattaggtatatctcctaatgctatccctcccctccccgcccaccccccagcaggccctggtgtgtgatgttccccaccctgtgtccatgtgctctcattgttcagttcccacctatgagtgagaacatgcggtgtttggttttctgtccttgcaatagtttgcccagaatgatggtttccagcttcatccatgtccctgcaaaggacatgaactcatccttttttatggctacatagtattccatggtgtatatgtaccaaattttcttaatccagtctttcattgatggacgtttgggttggttccaagtctttgctattgtgaatagtgcggcaataaacatacgtatgcatgtgtctttatagcagcatgatttataatcctttgggtatatgcccagtaatgggatagctaggtcaagtggtatttctagttctagatccagacacatgaaaaaatgctcatcatcactggccatcagagaaatgcaaatcaaaaccacaatgagataccatctcacaccagttagcatggcgatcattaaaaagtcagaaaacagaaggtgctggagaggatgtggagaaataggaatgcttttacactgttggtgggactgtaaactagttcaaccattgtggaagacagtgtggcgattcctcaaagtgatttcaactctacagatcagtttgaaagcacaggactggatctcagtgatggttaattgctcatctggccaaagaaaagcatgttgcaaggttaaggctcctatgaggaaaaggagagcaaggatgttcaggctgaataaagcccctgtttttattaattataaggtcagaatctggttctcctggaatcaaaatgctgagcaagcaattgtggagcaagggctacacaatggcagagatgaatgcaacctgatattccacatgcattctggcgcagctcattgcttttcaggcatctacgagaaacatatcaccccttaggtttgctgccgaagatgtgttctcactgaaccataacctagcagaggttctcaggttggaataccaaatagcaagatgatgtggtcagtgctacctatattgctctaaaatttttaaacatctaattgatgatttgtgggaaggttgcacagagagaagaaaggaaaaccaggaaaaagctgtgtttttaatttatgaaatattaagaagttttcggaagaagacccagacaatatgtattagatcataaagaagcaaaaaagtgctatgtaattttctgatggtagaaacaaataagaagatataaattcctcagtttacaccatgagtttaaagaaaatcatcacctacttactggttcattttgtaaattgagatcaatgaaattctctgaacaacagcatgaaatcaatcgtaaaatagcacataattcatggccagtattgtaaattatagtttgcttgacagtaatcggtaaggtttccatgcactgggatgcatttccttgtaacacgtctaaggataatgcctgtggatccatttctaatgcatattagagtgatctgtttttccctgtccacaactccctgtgtttgatcttatgcaaatgatgcaatcaagcaaatggaaaacaagatgttgttgctcaggggctcttacaaacagtggccttatgttttcagggtttccccaccctccatttacccaactcagatttgtgtacatacctgcaattgtttgaatccgttgatccatttgtgttgcccttgaagtgcctaatcacatctatagagacatattaccaaatcagttgcagttaagctaggaggagagttgtcattactttcctctttgctttaaatttcaaattggtggctttgtttatggcttcactctcaaagaatttatcagcctcacttccctgtaaccaatctttttttcatttctttttgttaactgtttttaaaaactctctcattccattcatacattttacacatgactactccttccccccacgcccaacctgatgcctcctcctcttctccatttttttccctttccctcatcatttcctcctgttttaccaagaatttcccaatcagatcaccgtgcaactttctctgccacatgtcaaattaggttctcttctctctctctctctcttttttcatgctttattattcaaagaacactagtaacatttcatcttcttatggaaatacattgagaataatccactttgggatggacagtacaggcataaaaacaacttggaactcaaaaaagctatttaatcacaatggttttctttgtattatgtttacagttttcagatttttaaaaccaaaagaaaatacccaatttctattgtagtgactttcatgtgagtccgtgtgaagagaccaccaaacaggctttgtgtgagcaataaagctatttatttcacctgggtgcaggtgggctgagtccgaaaagagagtcagcgaagggagataggggtggggctgttttataggatttgggtaggtaaaggaaaattacagtcaaaggggggttgttctctggaggccagagtgggggtcacaaggtactcagtgggggagcttttgagccaggatgagccaggagaaggaatttcacaagacaatgtcatcagttaaggcaggaacaggccattttcacttctttcgtggtggaatgtcagcagttaaggcaggaaccggccatctggatgtgtacgtgcaggtcacaggggatatgatggcttagcttgggctcagaggcctgacattcctgtcttcttatattaataagaaaaataaaatgaaatagtggtaaagtgttgggacagcgaaaattttgggggatggtatggagagataatgggcgatgtttctcagggctgcttcgagcgggattaggggcggcgtgggaacctagagtgggagagattaagctgaagggaggtcttgtggtaaggggtgatattgtggggttgttagaagaaacatttgtcatttagaattattggtgatggcctggatacagttttgtatgaattaaaaactaaatggaataagagaaggagaaaaacaggtataaaaggtctaagtattgggacgactcaggacatctgattagagagtgcctaaggagattcagcatagtcctgccagcaaagattatttatttacttcaagagttaagagtggcagtttggggatagcatgaggagatgtcagctgtgatggcttggagaaacagtgtaaactggcagtgtaaacaagagcaggacatgtatgagtagttgagaacggtgaataggagtatgactagacagaagatagtagggatgacaagtttttttggggcacagtctaagttggtctggtgtctggaatgagactggggcctaataaaaaggagcgtctatacaggagctcaaatgggctgtactttgtagcattccgaggacaggcctgacttctgagaagggaaagtggtaaaagtattgtccagtcctttttaagttggcggctgagcttggtgaggtgtgtttttaaaagacctttagtccgttctacttttcctgaagacggaggaccgtaagggatataaaggtttcactgaatactaagagcctgaaaaactgcttggctgatttggctaataaaggctggtctgttatcagactgtatagaggtgagaaggctaaactgaggaattatgtctgacagaagggaagaaatgactgcggtggccttctcagaccctgtaggaaaggcctgtacttatccagtgaaagtgtctacctagactaagaggtattttagttatctgactaggggcatgttgagtaaagctaatttgccagtcctgggtgggggcaaatccttgagcttgatgtgtagggaagggcctgaataatccctgaggagtagtagaatagcagatggaacactgagaagttatttccttgaggatagatttccatgatgtaaagaaaatgagaggttctaagaggtgggctagtggcttgtactgtagcatagcctgcctttgctggtgtgtgatgattaggcctggtggaactgccatcaataaatcaagcgtgggcgcctgtagtcccagctactggggaggctgaggcaggagaatggcgtgaacccgggaagcggagcttgcagtgagccgagattgcgccactgcagtccgcagtccggcctgggcgacagagcgagactccgtctcaaaaaaaaaaaaaaaaaaaaaaaaaatcaagcgtgatcaggctgaggaacaggaaagaaggaaatatggggaaatggggtgaatgtcaggtggatcagagagatacagtcttgggtgtcaggtgtggtatcaggaataatgtgggaggctggattgaagtccgggccaggaacaatggtaattgtgggacttaacaaagagtgagtacagctgaaggagccgtggagcagaaagtatatgcgtcaggtatgaggaagaaaatagattttggaaattatgagaaatgtagagagtaagttgagcatagtttgtgattttgagggcctctaaagtattagggctgcagcagccgctgcacggagacatgatggctaggctaaaacagtaaggtcaagttgtttggacagaaaggctacagggtgtggtcctggctcttgtgtaagaattctgaccgcactaaccatgcctatgaaggaaaggaattgttgttttgtaagggattgaggtttgggagattaatcagacacgatcagcagggagagcacatgtgtttttatgagaattatgctgagataggtaacagatgaggatgaaatttgggcttgattgaagtaatgggggctatctgtgaagctttgaagtacagcccaggtaatttgctgagcctaatgggtgtcagggtcagtccaagtgaaagcaaagagaggctgggatgacgggtgcaaaggaatagtaaagaaagcatatttgagatccagaacagaataatggattgtggagggaggtattgaggataggagagtatacgggtttggcaccatggggtggataggcaaaacaatttggttgataaggcatagatcctgaactaacttgtaaggcttgtctggttttaggacaggtaaaatgggggaattgtaaggagagtttataggctttaaaaggccatgctgtagcaggcgggtgataacaggctttaatcctttcaaagcatgctgtgaggtgggatattggcattgagaggggtaagggtgattaggttttaatgagatgttaaggggcgcatgatccgtcgccaaggagggagtagaggtatcttatacttgtgggttaaggtcgggggatacaagaggaggacgcaaaggaggctttggattgggaagaggggcagcaatgagatgtagctgtagtccaggaatagtcagggaagcagataatttagttaaagtgtctcagcctaataagggaactgggcaggtggggataactaaaaaggagtgcttaaaagagtattgtctatgttggcaccagagttggagagttttaagaggtttagaagcctggccgtcaatacctgcaacagttatggaggcaagggaaacaggcccttgaaaagaaggtgatgtggagtgagtagcctccgtattgattaagaaggggatggacttaccctccactgtgagagttacctaaagctcggcatccgtgatggtctagggggcttccaaggcgatcgggcagtgtcagtcttcagccactaagccgagaaggggtcagtcagagaaccttgggccagagttccaggggctctgggagtggctgccaggtgagctgaacagtccgatttccagtggggtccggcacagatgggacgtggcttaggaggaatcctgggctgcaggaattccctggcctggtggccagatttctggcacttgtagcaagctcctggaggaggaggttctggaggaaggcctggccgctgcagttcaggcatttggaagttcttgtgtgctggagatgtggctggggttcgtctcacagtggaggcaaggaattgcaacttttttctattattgtacaccttgaaggcgaggttaattaaatcctgttgtggggtttgagggccagaatttaatttttggagttttatttaatgtcgggagcagattgggtaataaaatgtatattgagtataagacagccttttgactttttagggtctagggctgtaaagcttctcagggttgatgccgagcgaccatgaactgggctggatttttatatttgatgaaaaacagcctaaacgctatctgatttgggataaagaaaaaggagcattaaccttgactatgcctttagctctagccacctttttaagagtaaattgctggtcaggttggggagggctagtcatggaacgaaactgtaagccggactgggtgtaaggaggggaggtgataaaaggattatagggtggaggagcggaggctgaggaagaattgggacctagcttggcctggcgaggagcagtctggggaggaggggagaggtcagatgggtctgtagaaaaggaaggttagaaagactcagccacgcttggacgcttggggttgagactgaggggacaggtgggagggaaagaaggaagatttgggacgagttgcactgggcacagagactaggaagggaccgatgtgtaaaagaatgcctagacgtcaggcacctcagaccgtttgcctattttatgacaagaattatttagatcttgcaggatgaaaaaattgaaagtgctgttttctggctatttggaactactgttgagtttgtattgtggtcaagcggtattgcagaagaaaataagacacttagattttaggtcaagtgagagttgaagaggttttaagttcttaaaaacacaggctaagggagaagaaggaatggagggtggaaggttgcccatagtgaaggaagcaagcccagagaaaagagagagtagagacacggagggaaggggttcaggggttcttaccctccagaaaagtgggaaagaggttggggcatggaaataagggattggggcacagagatataagaggtcagggtgtggaaataagggattggggtgcagagataagaggtcggggcacagaaataaggtattggggcacagagatacgaggttgggatatttgcccctcccccagaaaagtgggacttgctgctaagggtgaaggagaagaggttgggggtttcttgccccccagaaaggcagagaaggggtgaataatcagagaggcgtccctgcaatgattaaacaccaagggaaggctccttcccagtccgtgactggcgccagagttttgggtccacggatgaaacatgtctcctttgtctttaccagaaaatgaaaggaattgaaattaagagaagggagagattgaagagtggaaaggagaaagtggttgagggatagtgagaaaggttggagaagagagtaagaagaggttgcttacccaatttaaaattggtgagatgtcccttgggctggtgggtctgaggacctgaggtcgtaggtggatctttttcacagagcaaagaacaggaggacaggggattgatctcccaagggaggtcccccgatccgagtcacggcaccaaatttcatgtgcgtccatgtgaagagaccaccaaacaggctttgtgtgagcaacatggctgtttatttcacctgggtgcaagtgggctgagtccgaaaagagagtcagcgaagggagataggggtggggccgttttataggatttgggtaggtaaaggaaaattacagtcaaaggggggttgttctctggaggccagagtgggggtcacaaggtactcagtgggggagcttttgagccaggatgagccaggagaaggaatttcacaagacaatgtcatcagttaaggcaggaacaggccattttcacttctttcatggtggaatgtcagcagttaaggcaggaaccggccatctggatgtgtacgtgcaggtcacaggggatatgatggcttagcttgggctcagaggcctgacagtgacgacatagcagtcagatttcccaaaccagaaatctgacctaacaaactacttttttggtgtgaattagcttatcttaaaaacttagaaaacatttcaattgtacctaggttctgaaaatcttgtctgtgtggttatgataagcataggtgaggtgctggttgagtatgtggcattcataaatttcagtcttcaagacatatatgtatgtctctatctctgtgtacagttatgattttatttctataattcagtttaatatctgactttactcccatgcaacttagtagtaagtaaatcacagtcactttgggggtccccccacctctactaattatgtaaaagcttctggggtcttacctagttccttagcatctggagtgtggccacccaggatgctttctttctctgtgcaaagggataactattgagacaacccttccacattcagtgggtatcctcagtgcttctacatcacacttgggcaactgaaatctttacaaggttttctgtggccctgcctgaatacagacaccaaagtctttctttttgctctggtcttgcccccgacctgggactctaccttgaaaacaggggtcagggcccctccttcagagagcttgcacatttctacttccttttatccttattccatcaggcagggaattctgaattagggaagtggaagactccatacttcctatttctcccaacattatatctgagggaacagagtcttccttctctgttccctcagtcactctgtccagaagatttttttgtttttttttctgcctcctgaccagtcacattctgttttacagagaaatctattttatagttaaattctgattttataatttaattgagtgtactagttcgttttcatgctgctgataaagacatacccgagactgtgtaatttgtaaagaaaaagaggtttaatggacttacagttgcatgtggctggggaggcctcacaatcatggcagaaggcaaaaggcacatcttacatggtagcacacaagacagaaatgagagccaagggaaaggggaaaccccttatggaaccattagatctcatgagacgtattcactaccatgagaacagaagggggaaactgcccccatgattcaattatctcccaccgggtccctcccacaacatgtgggaattatgggaactacaattcaagatgagatttaggtggggacatagccaaaccatatcactgagaagcatttagataaaaattaaatgcagaaaacatatagggtcggtagcagggaaggacggaagaaataaaataggttagtatgacaatcagattgatctcagtacccattgaacaaatcctgagcattgtaggagtttagaagaggaagctctaagggcttcaatgtaaacccttacttggttcctcaagagaattgtccaaactatgaaaggagaagaaggaaaaacaaatcaatataatgaagagagtcacaaaggaacaacataattatggctgaaaagttccaaaagcccagttcaaactggaaaacctgaaattatactagactctttcagtgtgttcagtgacatctctcggaaacatcttagagatatgagaagtattagagacataagatgataagatttatccagaagtgggaactgggatagccatatagaagaggactggggatgtgaagaaccctatgtgacccagggagtatggctttgtaatggatgatcaaatttcattgatgagggaaatgaaactattgaaaatatctgggaataagaaggtaccaagagactggacattgtgtagcggcataggagtgattgcattgatgtgacaagtggaagaggtgggaagtaaccagtttgtggtcagagagtgcaggatttagatttagaatcttggaaatcattctgaagattatgaagtagtaggtgtaactatgctgaatgttgaataaatgaagtagaggtgaagggcattgcatttgaggaagttaaagtaaagccagattcagagatgagtcattattgaggatgttagagttgccaaaaagggattatgattgaaaagaaaactgagccaatgctgaagtcatagaggagagaagcagtgtgaccggagatgtgatgggggcatgcgttaactaggttggggcatatcttcttttaaataatggattgatattaactatggctattttttctccatctatgatataaatatatatcacaaaaaatttgaaaaatatatgtaacaaaaattaaatcctctatatgcactcactcagaaaaacattgttaacatttggtttaccactatctcctgttttgtttttattttttttattgtttctttcttttacaatgaagcactggtactttaaaattatgttttggcattcagacaggtacagctttgcctttttctcgtatttaatggtaaatctcctttgtcttacaactatagacccctacattggcccaacaattatattcattatattcttggagactttaaaacatgtttagacattactatatttctgagaaaaaaaaatggcagcctgggtagagggcatggggatatccttctggtcttgctcattcatttacaacaagtaaaattatgcgagttagtcatcacaccattcctggagatatcctgctgaacatgataaaaaatatttatctgaactcaagaagtttacattctcctgggaaggatataatatcaagatataaatgaaaaggcaatattgaacttgttttagtaattatgatatggaactaaacaaggtgatataacaagaacctggggatgatggtggccatattgttcaattatcaagaaagaccactcatagaaggatgaagctgaagcataagaaagagcaatccaagtacaaagagagagaaaatagatttcagtcagaaggagcagcacctgcaaaggcccagaagtgtgaacttgttgtgttagaagaacagaataatgtctagtctagtgtatgaaaaaaatagggagaatgttacatcaaataggatctcattgaccattattagatttcgttctaagagcagaagaagggtactacagggtgttactctgaagaatcaaaagatcactcatggtaaatggtcttgttttcttcattgggaaaattgaagtagttagaggataatgcccatagactctgctaccatctacccacctaccagtattggcacccacatagtctgcatcccctcccattactatagattgtctctgttccaagttcaactctttcacttttgaactagattctcctctttcacatattcaaggacaaaactccagcaatttttttctctttcatccacttcatagttttcccttcactagtgggtcatcccatcacatacaacaaatttttctctcatttaaattactttaaaaatcttctcttgattctacttaccttttatctattgctacatttatctgttctcctttaccacaaaactttttgaaaatgttcttttattcactgtttctaattcctcttctatttccttataagcccacttaagtcaggctttagtgctgacaagttcactgaaacttcaattgtgcaattactgatgactgccatattgttatacccgatggccgatttttaattctcatcttatttcacctttaactcttaaaaattacttcctttgactttcaagacaccataatctcaatgttttcctcataccttactggtcactctctgtctccttggttgatttctcctttactcattggcctcatatgttggtatcccagggttttctcttttatatctattctcactccgtttgcactcctagccatctatatgatgatgacttaccaaattatatatctcaagccatgaactcttcctgtaattccaaacttctgttcaaatatcctgacaatctcctcttggttatctaactaacatagcaaatgtctaattgacattcattatatgaattcttatcttcccctccatgccttcctcaaccaataaaatggttactttatccttccctttgctcaggtcaaaagccttggagtcaactctgggtcttctctttcatactctacctacaatgcactgggaaatcctgttagctttgcctttaaaacatattcagaatttaaccatttcttacttgattattactggcccccacttacttgatattacaaatagcctcttcagtgagatgtattcttatgctcttgctcactaccatctatacgtctggcagccaggatgatactcatgaagtccatgtttgattgcatgacagctctgttcaaaatccttagtgtcttcctaagtagaacctcttagattaaaaaccaaaattcttacaaagacctacaaggcctgcatgaactgacccctcattaaatctctaatatcatctctaacttacttcttcctaatttgttctgctccagccacctcagcctccctgctagtcctcaagagtgtcaggcatgtccctccttccacagctttgctctgcttgttccctctcttggaatggtccaacccaaaaattcccataacttttacactcatccccacttcaggtctttgctcaaaatgccaccttcccaatgaggcctctgctgactcttaactattaaaattacccagaacttctaattctccttcctctgttctgtgttttctgcagcagttttcatgtaatgcagcatgaacatcttaaactccgttacacattcactttaaagacatgctatcttctaaaatgcaacacctttcttacccataaacttcataataccttggataatctagaggcaaaccctaactagggatggaggatttgacaagctcaactaaactatttctatttcaatcctggctcactagccattctaaccctctcaagcaacatgagaggtatacttgttctaagtatactcacttcccatcctgaccgccccctgccccagtcccagttgttatagaaacggacacttcccactccatggaagaatccgggcacggataacaaatcctgaactaattgcttcaggaagctccttccatctgaggcggatattctgggtgggtttagggcttaggtgatcatagtcaccttcaacgcatgcagtttataggggaaaggtgagtggggcactctgtgataagcagacactgcgatatgtgataatatgatgatgcattcttgagatacctaagtcctaccttgagatacctaagttccagatatgcaagtctgtaccatggaaacatacgcaagcaagcatcgggcctttttgaatggagtaacttcttcaccacctacaagttgggtagctaaatccccaccccagcaaagtagaatgtaagaaagaaggaaaacctatcccactccaaagagttcactggccaaagaattttgtagcatccaatctcggttgcggctgaccaagacaatctgatatggctattatatatttcaaggtcacgtggatttggccacatggaatataatttctggctggagcatgttctttcagaaagttggatgtgttctcagttgaaacactataggttttctccaattgcactgaattacccatcaggaattcctctaagcttggtgacctccttggttttgctcctgcaacgggacttagagtcaaatccccagcttctctttttcagggaggacaaggaattcagacagatgagaacaatgagagagagaaaggtcaccagagagcgaagatgaagagaacagaggaatggcagatacaatatgttagcatataaacacattataattttggccaagattggccctgtcggtaggagtttttctttgcataaagttttctctcagtaaataatagtctactctctcggtagcatctgaggccactgctgtaatgattttttaacttcataagtttcctagaacgttggtccaaatgaaggcaccccagttatgtctcagtcgtgtacctatagtgcgactgttgctgccatctctcagcagtccctggcaatgccacactgcttcaccatcagcttcaaagtgtccttgaagtatatattctgactacattgaatgggagtgccccatctcaacttgcaaccattggattcctgtaggatagaatttgtaaagaaaacaaggtttaatcaaaagcattaagagtctcttcttgttgacaactttttgttctaaggtaaccatatttactgtaaattatttttttaatctctcttctagtgacctacatgtttaaccaattgattgtactttgcatgaaaatcaaagtgttctttccccagtttacttttgttatcagtgcaatgcaaaatctgtttgcctgaattaggttgcatttcattaatctcttcaatatgaaattgtggtggctcatggttaatgagatttaagaatctgtgttacttaaattgtgactaacttattttaaaagtatgtcagaaaataatgattgtttctagtagtgttaaagtattaatgattagtaagtcttggtacacctgactgaactttggttagattaccaagtgtaatgaagtgttcaggatatttcagaattgagttagtatattacagattagtttaatctaatacaagagaatgtggtatctattagaaagacagacaatataaaataccagggaagttcaggggagggagagattctttcagcctagggcactaccctagtctcatggtcatctttcagacctagctcgtttcattcattaattattcattcattcaaacacacatattcaaaacctacaatgtgccaggtattgtgctacatactaaggatgcaaaatgaatatattaccattcctgctcttaaggtatttagtgtatcatatagtcatgacacagtgtttttaagtgttaagctaaaagtatgtacaaagagaaagagaagaggctaatagctccatcttgtgctggggtgacagcaaggagtgttagggacatcacaaggaagaaacaggcatctgcactgcacctcgacaatttgaaggtcaaataatagtcaggtggtggacaggagaagaatggaatctgacaaacggaattacaagctcaaagtcattgttacaagctatgtattggcatttcaaaggcaactcctgttgtcttcaaatatgctttaaaataatttaaacatctcatttatttttaaacagagccattgaactaagactaaacttagcaaatgatttacctggtcacagacgttcaagaaaacagtaaaactgttaaaatgaaaaagtcaaaacaagagtttgattgacacttgtctatttaaacataaccaaagtatatttaagggatgaagcatcctatatgttattgctattgatttttatggctatttattcatattttaagccttatcttaacaattctctgagataggactatagtggaggagtgaaatctcctcaataagaagtataatgctgagtaaattcttgtttctccctatcccctagatttagcagtatttacaccccaccagtttctactaagtgcatgcacacatgtgggctgtacaaacagttcctgggtcctactgtacacagcacagctgccaccagaacacgtggattccccagttctgactgtcctggattctagaactatacacatacagtaagtagaaatgttgtctctctcacatgctggttcatgcaagaatctcagtgagttcaatcaggggaggagcttgtgacataaaattaattttattgtgattaaatgcatagaagtgattagttcagtggatctgggaacctttgattatcacttgccagcctaatttccattttgtctttatgcaatcaggctgagctacataggtacacagattccatgcaaacttcaataaacaaaaaactgaccactttcatgactgccttgaatattttatgtttggggcattatttgtaataatttggaattagaaagtatgtatatctttttgagtatagtccaggaccttcttattcccttattacctgcagttgatgtcagaaaggaagtttcacatataggcatgttctgatgatttctggtattactgattcttgtccatttcctgatacctgaggtataaggtgtactattgtgctgagctaaaatctaataggtctctcttatcaagagttaatacttgttcatatttatctcttctggactcagttttcttatctgtaaaataagagtttagactaaatgaattctgacatttattcaagccgaaaaatattatgattcagatctcattgttccatgtctaaattctcctgttggcttcattgtgcccctaagccaagccacgttacttagccaaaaagatttcccacgactcaggtgtttctcagcttaacaatttcctgtctgttctatgacttgcccttctcatttccactgctaagttgtaaccctcatctgaaatgccctctgttcttccttctacctatccaaatccaatccatctgttaagaataaaatcttatgtatctaagtagtgtgtcacttcattcaagaagtcctgcctgattttttcagcccttccagtcatcaatttcactgttttctctaattacatattaaccctgtgttggattcctggattttccaggacaattatattattccctcttttccccatatctaagttctcagaagttctgcttctgaagtttttgttctacagcttaaattcaaaataaatactcgcttatacatttttgtattgttagctaattaaaattacaggtaaccagatggcaggagccatatcacatttcctttttgcccctcagaataggcattggataactacttcagtgttttattttaaatgaatcaattttgagatttatgttttttaaaaaagtgtcacaaatccaagttcaaatgtgtcctttgaaaatcctgtatattttagttttgacttgaatgaatgataataatgtattttaccattcccaggtggaaacaaccaagaaaaataagtgggattctggaacgctatgtattatatatgtcaaaccatacacatgattttacaatttggagtgtcatctataacagtacagaacttttccaggatcatatgctacaatacgttttacctggtaataaatatctcatcaagctgggagtaagtttatttccatcactttctctgtccccattccttccacttcttctccccttcccgtggtccatcttttctttctctctcacttaaaaaaaaaaaagtcaaaatcttcatgtattgctgtttatactgaaaactctcttcccatcctaaatgtgaattctggtgatctaatacctacacatttattttatattatgcaaatgatagaataacaccctgagtcagtagattttcccaagtcaaagttgggattatcaagattttcaaaattacttgtagaacatcataattgttaagaactttttctaaagtgctaggattcataaggttatttccctgtggcatttgtattcatttaaaaaacaatgcacagtatgaaaatttagatcttatatttttaaatggaagtttaaatgaccgtcaaatattcttgattgttattacattctggtttatattatgctcctatctcagaagaacagtcacttaataaaaccccagaatcaacatagtttagaggttcccttagacaaacaatagcattttttaaatgcaaaaatagcacttttacacaaaggtcttttaaaagaccttgatattactgtggaatttatactcagtaattccttttgttttttgatgaaatataatcttttttaagtttaatagcacgtctgaaaataactgaatataaacatgagattgtccctatttgttttaaacacactcttcattttatagcaatacctatataaggatatttgctttgataaatgccatagaaaatattctgctcttgattatgaataaatttacatttatgtagacactgtgtatgcattcattttacttaacatgctcttgaatgctctaaatattataccatgagaaaataaactacactcaactattgctaactgtctgacttaacaccacaaaacaagggcaatcagacagtggttaaaaaaatactgttcaaaactgactccatgtgcctaggtgttctgcacagcagtttatgaaacagcactttggttatgtacagttttattacccattaagtaagaaatatactaacttgattttcaaatgctaacacagaaatacaaactattttcaaaataatggtagtatcaaaattaggaagagtcttaattttttggaagcaaccaaaactaaaccaaaaattgtgctcttggttgtttatcagaagtaggcaaatgacatagaacagattctcttcctagggccgtttttaggatgtgctgtgcagtcaatcaattcatatcaatctcctagattttataaatctataataccttgaaaaatacatactagtagattaggagtcctctgccctgagtattaattcagattttactacaaactgtgtgacctaaggcaaattcacttaacctcactgagttttattttcttcaagtctaaaattagaacattgaactaaatgatgtttaatgtctctgagccataaaattctatgatgctaaaaaaagtaatcccaaacactattctatggagtcaaatgctatctgtcagccgctgaatagtgttgatgcaagatgttataaagatgtgaaaatccttgccttaactcttggtagggaaataaacttgctcacattattttcaagttcactatatttattagggcagaaaataatatattttcagggaggattcaactaacagggtttttacttaactctgttaagcagtaaattaaatgaaccagaacattttaggttcatcctggttaattgagggattattgtatatttcacagtttcaatataataactggctttcaaggtcattagattagtagatcgagagcaggttctcagcaaagtggagttgcctttatagatcattttagcatgtcgactaagagctggaaaacaaaacataaagataacaaagcctttaagcagcatttggaatagaggaagctacacggggatttgaaccactatgatttaccctaggcttggagcaggtatgttacttcatgtaacgtcatttagttttcacatttgactggattataaactgctgaaacataaggactgaatctttcaaaatttgatctgcagtttcaagcacagggcctattggaaatgggaagctgagcaaacaattcctgaatgaatgatcaccaaggacatcatttcataaaggttctaagacttttgatatgaattaaataatttgcttggaaacactggaattaggaatggtgtggttccaaaacatactctttccactgcaaaaaaaaaaaaaaaaaaaaaaaaaaaaaaaaaaacataatatgttgctactctcaacaaaggctattttgaaatgtgataaaatgtgatagctcctaataaagaagacaatatgttaaaaataaaataaagaagctattaatacagacagctatcaagacaggtgttgcttgataattttcataccactgctagccatttgtaacttgatgaattctaagtattatatattcctgaaagattcctggaagtggcttcactttttaagtaattatggatcaagtggcctttttctttttcttcgtgctttaaaatatgttgcactcttaacatccccaatccctgtggacctgaaaacttactggaaaagagaatgctagttttggtccgggcacactggcttacatctgtagtctcagcactttgggaggcccaggtgggcagaccagttgaggccaggagttcaagaccagcctggccaacatggcgaaaacccatctctacttaaaatacaaagaatagccgggtgtggtgctgcaagcatataatcccagctactcgggaggctgaggtacgataatcccttgaacccgagaggcagaggttgcagtgatctgagatctgccactgcactccagcctgggcaatacagcaagactccatctcaacaacaacaaaaaaagagaatgctagttttggattgtcttaatagtcatgatttcaaaaataattgataaaattttattatttatgcattttattgtaccaaaattgaatcccttatttggccagatgttactcatcatttcaaggcagagttatgcctttatgaatttttcaaaatggctgtaactgagaaaagctataggcgatggttaaaacaacttattttaatggctctcaggctttcaaagaccttgctatttcataaaggcatttttaatcaaccccactattttgtttagtttttccagaccagaattttaatcagcattcagctgtattgaatgtagtggcctctggtgcgggcaggtcaaacaagatactgattggttcaatttcatttagatgatgtcagattagaccaattggaagcagctttaagaacatttattttcccatcaaaggaactaagataatgtcctgcttacttaggaccctctaaatgcatccaaaaagaatgtgggcaaaacaaaataaaataatttgcaggtaattctgttatttcagcagcctctttataaataatttcatttacaagaaaaatgctttcataaatgccttacattcttaagagatttctttgtcaagttactggtttatggatctcagatgacatagtagatgaaacagtccttctaaaccaaaggatgcttttacttatcctagaagacatcataaaatcctcaaagtaaattttaattcacactgtgttttaaaaatatatacttatatgttgtatagtatagaatttatttggggagagttagcaggggaaatattttagtatacaaataagaaaaaaatagtgacaagtagactatcagaattaaatcccagtgtgttacaagtttaacaataagaagctgcaacatttttcccttctaaggaaaaaaaatctgaaaaatgcaaatggatggattttttttctccctgagaagtgggaaaaatttgtctttgaccatttttcctttgataactcagctgtctcatatggcctcttttcctgccatattttctggtggacttttagcacatttgaaatgtctggggtcttcaactttttttctattttaatcgttgggcaattattttttgagctcacagtgacctgtcctaaagctttgagtcagagtttggccacatttgcaaagattccattctctagaggagtatggtttttttcttgcacagaaaggcacatgccacagctgagaattagaggaaacccacagaggttaattaggtacccaatcttaatgcaattttcatgctcaggccacaatttaacccatctgaaagttgcttaattaagctggtaagaaattatcctgaagacatgggctattgctatagtcttgtaatagcaagtgagattaatttccatgtttgttgaccataaactgttgtttatgcttataatgaagaatttgcaactagttgcaacaactttgcaaatagtagtgtactcccatatttaaaaaaaaaatctaaaaatcagtcagcttccttctgtctttggggaaaagaatatcgactactttaagaatcacaaaatcactcactcagtatcaaactgaaaaatcagagagacgcctaaagaaagagatgctttaattttttatcttagtaatatctgtcttacacaaaaatgagctaaatatctctgcttttttacattgtcttatgattttgctttattttctttttgattttggtaaaatttagtgccttttgaaagatttttaaactttgttgtatcaattgaaattgtaacttgaagagatactgaaccaagcttaagtatagttttcaaatatcattgttatataaggatataattactaatatttgctagcaaatatgggctgaaaaccccttaatgtatttatcaatttcctggagaagtgcttgtccagtaagtttaaaacattatttgcagtttattatgaaattgcacacggaagtttctgtaacattcatgttaccatttctgacattagtgatacttaattagggaacagagagttctgtgatcatgttaaatttgtcaaacatgttttaatgaagcctatctactctgacacataagtaaattatgtgatcctttaagccattaaacattcactcaaaaattgctttgtatttgttgttttatgagaaacattgttttatttaattttatttggtgttatgctataaacatattggtcacactgtagaaataaaaggcaattgtatttgctgcacatcttttcttccctagaagtcagttgttttgtcttaaagtagtcttcatcctctagtactttacttatgttatgtgtacacatgctgtgtgtgtgtgtgtgtgtgtgtgtgtgtgtttaattcactctgggaacctttgtgcaaggctaacttcagcagggctgtttatccagtcaatatatgccctacatctctaggctctgacttaagatgcttccttaattcatacattcataccatctcagttattctctaactattggggatggctatcttatgtcttaaaaagcaaattaaataaatgttaaatcttaacactgaaatgaatttattttggggaagtaaaggtagcactatataacaaaatctgaaactcttattatgaattctctttcctcaatgttcatgaaaacttttgggaccaagagtgaaatgagcatttttgcatctctgtttaggcttgcacaggtggtgggtgcacagtgagtgaggccagtgaggccctaactgacgaggacatacccgaaggcgtgccagcccccaaagcccactcatattcacctgactcctttaatgtctcctggactgagcctgaatatccgaatggtaagtgaactcttttagcctcaagttaaaaagatgattagcaaaggtaaattaatattctaaatggcagcttatatgtggtgcttaatttttaatgatcattttagcacataaaatacctaagatagtatcattgtctctagttggggagattgtggtttttaggctaacacacaattttggtggctcaaaagtgctcccttttgatagtttttgtgtactgcatctcattgtttaatatgctccaggagaggtgaagagagcaaacggggaggattcccaaagaatgccgtagtgagagtgacattgtattttcaatgactttctgtttttaaaagccattagttcttccttggcgaaggagagaggtggaaagttcatgtacatattgtgtcaaaacgcttttgatttaataagtttatcttaaaagaggccacttggaactctgtattttttaatatactatttataaatatttcaacatgctgtttttaaacaatgcatagattaaacatacatatatttatacatatttagctggaggcaagttttgtgcatttctaagcaatatatatgtttttgtacagtttagtgaattaagctagtcagttacgtttcactaaaataaaatctcattatgaagaatttgtaatagttttgggtagaaattgctttattcatttagtggaaatatctttaaggttcatataacatagtaccattgtttcacactgatggaagcttacttgacattaaatttcattcctctttgagacaaatatcaagaagacttttaatatagaaactcttttaagaaactcattactgaaaattgaaatgggctcttttagcacagccaaaaagaatgaaagaaaaaagttacagttttattagtttgtcttatgtttactatgatattaattattccagccatctcattttaattaaacttttggcaaatgcactagatatatttgaggtaatggagagaattctaataatcagagtgaattattatctctgctattgaagttattcctgtactattacaaattttccaagaaaaaataaatggatgcctatttgataccatattaagcaatcaacaatcttgttatgcttcttacttcacaaagtaccctagttcatagatgacaatgaaaatgttaatgatttatttcaattggattgctgtgaaatgctgttacatgatttgcatagtagagcacttcccttcatcccaattggttaatacaactagaactacaattgctctcagaatcttcagctgttcagggaaacattttccacattacaaagctctttgaatgttttgtgtatttgcgtatgttttgtatatttgcaagcagttttaaaatgtactcatcaagcaagaagaatttgggagattttggagatttgtattgacacttccatggtattccaaagtcttgtgtttaattagagtgggatttttagaactttaattgtggtacaatggttagacatttaaaaggcagttttattttttttaaaacgactttttttgtttttactacttctccccactttcccccaattttttagctttttgtttctcttgttgattgtctagagagggataatctgattgttggaaaacatcttgtctctccatctgtcttcgaagtccccacacctctcctcaaatacccaaagaataaagtctaaattttttagtctggtattcaggttactaccaacttgtgactcaacctgaatacacattgccttataacatatcttcctttctagccatgctggaatatttatggcttaatgttgggttggaaaacatgggtggagtcaaataggcctagagtcaaaaattgtttctgatgtatagtgactgtgttacctcaggaaattcattaacttccatggaccccaatttccttgattagaaaattgagattaacaggctgggcctggtggctcacgcctgtaatcccagcactttgggaggctgaggggggtggatcatgaggtcaggagatcgagaccatcctggctaacacagcgaaactccgtctctactaaaaatacaaaaaattagccgggcatagtggcaggtgcctgtagtcccagctactcaggagggtgaggcaggagaatggcataaacctgggaggcggagcttgcggtgagccgagatcacaccactgcactccagcctgggtgacagagtgagactccatctcaaaaaaaaaaaaaaaaaaaggaaaattaagattaacaatccctgtcatcaccctgtccttacctgtagaaatacaactcattcttctaggctaaccgtaggcctcttattccatgaaatcattctactcttccttaagtttaaagtaaactttccctcttctcttgactatgtgaactgtttctatgccttcataatggaacttcattcagcctgtgcttaaagttatttgcgtatatgtcaaacactcccaccagatgctaaggaccataaatcattaatttctctttcactccgcagagcctaacacaatgttctactttttattggtacgcaataatatttaattcatttaatgtttcttgtggaaattacctttgatcagtggcatatatactccaaagccctggctctttaatgataccaagagagatgatagaagtacttaccatccagtgtctgcaatatatttgttcaaaatgcatttgttcctaaaatatatttttctagctgtgtagattctgaggctgggtttctcttttgagaataccgatcttgcatttgaccaaagaatttttaattttcttttctggattatgcccaattcaaagttaatggtaccaggctcacatggcaatatatgctacctaatggttgctttctaatttctgaatatgctgctgaagagaaatacaattggagaataagatagacttcattcttgtgtaactaaataaaccctttcaaaagattttaaatggtatttctcaaacttatctgattcttagaacaatcttgggagcaccaattgaataagtagattctaggctccaccacagacctcctaaataatcagaatcttccactgcctcggttatcatcaaaatacccctgggtatttactacattttccaactgagacctctcacaaaatcctccccctggatttttgttacatcttaaacccagcatatccaagttgatttctcctcatggtctccatctctctgcttgctctttctcctgtattccctctctcatggatttgcaccacccagccctgccagccagtatactgggcagcagtcttcaccttaaaccttgctcacccctgactgctgtcaccacacaacccctcgactgcacttctctagtgaaggccattaatattgctcacccagatcgcttcaggagcctcctcatgccatgcaaaaaatttgcatttgttcattcaaaatatgtattttgatgacctactaggttccttcactcttatctatacagtgcatttccttgcttcttgatctcaaggatatcagagtcctcggggaaaatatccatataaatgaattctcacaaggtggggaggtgcacaaggtgccaggtacacagagaagcagctcctagtggttccctatgagatgtggacatgtcatccctctgcatcctcacgaagatgttgcaggaccagatatagacatgtgtttagtctgaaacaggtattacttgcctggttttgcacactcaggtttcaaaatcttgactctgttaatcagttatgtacctaaaggtatgtttgttcactagggatttataaacatgaacaaagacttgttgagaaaaattaaactcaatttctataatgagaactaggtatatttttatgcttgcctatatatgacaaaatatgaaaggtataaaaagttctaatataaatgtccagtccttgccaatcaaacaattggtagcctttggccagcgtggcttaggaaacattctgtccttgtcataactgattctgacttaaatgatcatctcctactcgtgaaagtctgatggtaatccttaaccaatgctttaagaaaagatcctctccccttgttatttcagttctcttccttgtctcccagcctggtcctgctccacagtgtctgtgctggaaagcttgctagttggttcagtacatacttcatgagccctgagaatttttcctaatttggtgtcttttgttcagcagtgtaccagcagctccaagaatagtgcctgagacataataattgctcagttaaaaaattgttgattaccattattaaagaaaaaaacagaaaacaacatgttctggaaaggatgtggagaaactggaacccttaaatactgttggtgggaatattaaatggtgcatctgctatgaaaagtagtgtagaggttcctcaaataattaataatagaattattagatgatgtagcaatcccacttcttgaaatatatccaaaagaattggaaacaagatgcattgcagcattattcacggtagctacgaggtgcaaacaacctaagtgtctatggacagataagtagataagcaaaatgtgatatatttacacaatggcatatcactcggccttaaaaagaaggaagtcctgtcatacaatatgctctggatgaaacttgaggagattatggtaaatgaaataagccactcacaaaaagacaaatactgcatgattgcacttacgtgagtttatctatagtagttgaatgcacagaaacagaaattagaattacggttaccaaggtctgggtggaagggggaaatggagagttgctgttcaatgggtttagagcttcagttttccaagacgaaaaagttctacaactctgttgcacaaccacgtgtatgtagataacacaatggtacacttaaaatggttaagatgcccaattttacgttgtgctttttactgtaataaaaaaaagatacagagaggatgtaataaaatgctataaactaaactagaaaaaaagattaagaacagtgttagtttaaaacaaaaaaaaattgctgattaataatcacatagagatctatgcatgaagtatgcattttttaaacaagggtgagctcatactatttgagttgttgtggaatttacttttctcacttcacaatatggtgcaaacatctttccttgcagttcagtggaacgtgacctcattctttcaaaaggcagtatgcaatcccactgaatgaaactacagcttacaagacccatctttttattgatggacatttctgtggtttttgctattacaaacaaggttacttgctattaattgcctcagtctgccaagtacagtctttaagtactgagtcattatcacttgattcacacctaaggctttgcttgccttcaaatatgtcctgcttaattctagtcccttgcttcacatacctgcaaaaatgatggtgtgacactccagctctgtttctctaatcagagtcctttgcacccacgttccctctggcaaaggtgttctttacaggctgtgatttcagacatgattttaaaaccgctgaaaagagcgacttttaggtccaaggtctataggaacccttattatgtaggaccttgacgcttcctttgtaagaccattagctatcacagagaagtagcacaaaggattactgtctaatacatttgtgacctgtattgtgtagattgcaattgcgtaattaaagttctgcttttgagagcttccaaattctcatgagccatattcctttttagaagcttaggccttagaatcctgaaatatgttttttcttcacacttcaagtctaccttgctaaaacagcatagctatctgactatgccaaacttattcgtcattatctagcataacatttacagtgacattttaaactaattagaatatgtgttttttttaaatactaactaaaaatatagaatataaaatgtttatcttttattaatagctataattccttgtaactaacctctatctttacctaagtaaatcgacctaaaatagtttctttattagactgagccccatgagggcaggaatcatatgtatctttttcactgccctagtcctggcctttggcagagtgccacggagtagaggcatcttataaagctgtcgaatgaattaatatttaccgatgatagggacaataccaaaattgtaatagtgttgatgtgagaagcatattcatatgcaatcatacaacatacacaaatgcacactgtgagcacatttgatgattatgtaatataggtgggatgatttcaaagacagcagagaggaatcttcctcttggcctgctgaaggcttaaagcacacacttagagacctagtccttttgcttaagatttcatcagcctggtaatctgtagatttcctaatgaaagacagcacatagacttgtcttgtttgtgctctgcatgtctcagtatgaaaggatatgtttttactgtggtcaggatttgttaataaccacatgggcataattaagagagaagcatgtggctgggcgtggtggctcacccctgtaatcccagcaatttgggaggtcgaggtgggcaaatcacctgagcctgggagttcaagaccagcctaggaaacatgatgaaaccctgtctctaccaaaaaaaaaaaaaaaagaaaaagaaaaaagaaaaaaaaaattagccaggcgtggtagtgtgtgcctgtagtcccagctacttgggaggctggggcatgagaatcgcttgaacgtgggaggcagggtttgcagtgaaccacaattgtgacactgcacttcagcctgggtgacagagtgagaccacgtctaaaacaaaaaagagagagagggagaagcatgagagctgggcacccattagacatggtctagcatcttcttgagaagtgaaggggacctgagaagcttatggaaatattttcctaatttagtctttcatattggcccatctttgtgagaatttatatgtgaacatatgtcaaaatggtggcaatcatgtcaaaaataatagaaacatcttagcaggttgattatttttgtagacttacacgtagtaccttgaagacaatagaacgttatttaaaaaaaacatttggctcagtgttttgagcttatatattctgtcaataatgggtggtagagaaatcaattaactataggtctcttatacacactctatacatgttgtccttcacattaagagatgatgctatagaaataagttttcataatgtatgcacatgaagatatatgtataaatacaaattaaatattctatgcatgcatagaaataaatacttgatttcctgttaacaataataacattagtaataataataatagctataatttataagaatttgccaggcactttaattcccataactagcccatgaaataggtattgttatctcacaaatgtggaaacttagatttataagtattaaacagtttaattattcaaaatcaagacagctggttaagcagaaagattgtataaatcaaagcaaggtgtgaatgacaaaaattcacggttttattcactatattatctgcctctactttttgtagaaaggcttataatgtagaatttaatctagctgtatgaaaacaaaattttgttacttttacttgttcaatgtcctgttcttagtgccaatatttaaaattcataagatctgtgttctggtttttctctggttttggagagataactgtttgatatttcatttgattttcttactttttattttaaaataactttatttttaaatggtcaaaatgtgattctattttctttcctggaaatgctcagttttaataagtgaaatggattatagaactcagcgaatcacttaggaaaactgcttgacagttttgagcaaaccttgcgtaacttttatgaaacacctccagtcagtttgtcaggtagaatttcccaagcacagtcttttttagattccgttgattccatttttaggagagcataacagtaataaggcattatcccgcaatgtgaaagctcttctctcttttcctttttaattgaaggatcaagtattcacacagggagatatctgccacattcaatcagcatctggaccttgaggggagccctcagttcatattcctattgccatgctgcactggaaaagacaaacaaatatgtttggagcatctatattcactacacatgttatttttatgacacactaaagcattgttgtttaattcttacagtaaacacaattcttcagcgtaaatagagataccttgtattaaatttacattgtattgtacttgcattgaatttccttggttatatatgacaacctattgagcaccttaggaaatacaatttgacataacatgatgaagaggcacaaagatatatatcccagtggatatgctttatggacaattatcatccagcttccctgtgaaaattaaacaccttaaaaaccctatcattatggaaacagaaaggtgataaacttgaaactccttctgttgtacagccaatgggaattaagtatccattttgtggattatccattgaagaactgaatgtctagaactagattaaattaaactgaattaagccagaacctgaccccctttgccacatggcatgttacagttttattttgcttcagctgtcttactgattattagtgccagagaataagcaagaaaaagcctgaaaaaatacaatatggtacaatataatagagtaagtgattttttatggtgaatatttctcttttgcttttctagattcactctttttcaactctgccccgtgccctgtaaggctgaaccttcctcacagtggcaatgggcttcctctctctctggcttcctgttggtttgtccatgggcagcaacggcaaaagatgagagggtgagaggagcatggagtctcagaactcattctccctggctctctttctgcatggctctggattccagggttgcattcctccagtaaaggctacatttcctatttgaagcctctttctttctccaggttcctgaatttgttctcaccctttcctctaaaaacataaagaagtttactggctcctagccaactagttaaaatggtctaggaatcttagctagtactagctgggaatgctttattgtcactggttgctttcccttaaccctgtccgcatctttgtaaataggagttccactaaaatcttttccatgccatttgagttgtcattggtttcctgttgaaaccctgactcattcctaaattttatttaatccacatttaacacggagaggtgttttttgtgtgtgtgtgtttgtttttttgatgggggggtagtgcgtgaagataaatttaaaatgactttcttcatgctaagagtggcaagaataaataagtaaatgaacaaaatttccattttcttaaactttgtttcaatacaatagacatcttaaaggccaataagaagagccaagctcaaagattctagtggcggcttgcttatctaataaacccatcatatttaatttttcaaataataatcaacttattgatatatctttgaaagcttttcacttattgttataaaatatttctttgttatcattagtgaaataatggcttatgacatcttcctcttgatgaagtagctctgagtgccaagtttagcttataggtcagtttcggccaggcgtggtggctcaagcctgtaattccagcactttgggaggctgaggcgtgtgtatcacctggggtcaggagttcatcaggagttcaagaccagcctggccaacatggcgaaaccccgtctctactaaaaatacaaaaattatctgggcatggtggcaggtgcctgtaatcccagctactctggaggctaaggcaggagaatcacttgaacctgggaggcggaggttccagtgagccgagagtgtgccattgcactccagcctgggcaacaagaacaaaactccatctcaataaataaataaataaaattaaataaaaatcaaggtcagtttctcagataagccctattacgtatcctacccagactaggttagcatccacctctcccttctctatcccatgttttccttctatccatctgatttttaaaaagtaaactttacatcctcataatacctctaatgtctgttctttcgcttagattgaaagttttgtgaaggaagtaaccatgactgttctgacaacttctgtattaccagcatgcaacacaatgtctggctcatagtagctaccccatagttactgatgagccagatgactaccagaaaccaaatctaaatccagcagacttacaaaaattattttacagtatttagtaaatacttgtttctttgcactttctggacttcattggaaaggaatgaattttaaatgaaaagatagcatacaaatataagaaactattggctaatgacagatagtgtgccacggaggaatacagacctgcctaagcttgtttttgagagatgttagtttagtttttacaagagaagtgcagcacatgacataggtcagaattggaggagatagtctaaggtgagcttcctatagcaagtaaaactttaactcatactagaagcaaggggacagttctgtgtgtgtcccttctatgtgcacagtgcttattactaaagcacattcatatatgctcacttgtttgattctcagatcaactgtcaggccaccagggcaaggaatattaccccattttgttggtcaagaaatgaaagcttagtgagttttgctatctaaccaagttttaaaggtacgtggtcatgacagaagggctgaagtggttggaggaagatccctgaaaaagaagacaattggcttggaagcttttgactttgttttgaaatagttcccagaacaggagacgcactcaagaactaatttgttgattgaatgattacttacgtaaatgtatatgcacaaaattgatacttcaaaataattggccatacaatttatcctgttctgcaacttgctttttttctctaattcacatggagtaaacatctttttatgtcaatagcatagtgctccctcatttttcctcaaagcttagtaaaatgccattgaatgaaaccacaacatttatagaggctatctggtaaatgattaatatccattccttgctacagctacatctcattaatgccagctaaccattaattataaaagatgttgacaataaggtttggtgcttggactagtagatagtcctcaaatggattctcatttatttggatttggtatactccttgaggtagtgttgcaaggagtgtttagccaatagttatatcctgaggagtcctcaaggcctgaggagaggaccctgaactagctgttaagcctcctcctctaaaacaaagtcaaacaacagggttgaaagtcaaagaatgaaagagaaaagaaagctgatgtgcctattttaatatcagacaagactttacagtgagtagtattattagttataaaaatgtagtttcataataataaacgagttactaaaattaacatttattttttatcaaaatatactataagggcccacaaagataaataataagagagatgatatttagaacacatgtaaccatcagaaaactgtatccagaatatataaaacatgcctacacatctataacaaactggagttaacatctgaaaagtcatttcacaaaagaagaaaaattaaatgtctgataaacataagaaaatgggccaacttctgtaataatccaaaagtaaaagataatacccaaacaagataccattttttacatctaatactggcaaaaatttcaaagtctgacaataaggtctttttgaggatatagaacaatgagaactcacatggactcacatgtacactagaattgacatactttcaaaaagagatgagcattgtctagtaaaattgaacatatatcaacaattcctctccaggacatttgtcctagaaaatttgtgtatgcgcttcaagacacatatacaaaaatgtgtataattacattgatgtcatagccaaagtataaaaacattctaaatatctatcaagagtagaataaataaataacatttgccctgtaggaatactacacagtaatgaaaatgagtgaagtatggctactctcaaaaacatgtatagaacacatgaatatcatgttacacaaagcaagatgaaaaaattatatatacaacataactctattaatataagttagaaaaccatgagaaacttaattatgttgttaagggatgcatttctcagtagaaaagcaaggacatggttcttcaaaagtcctcatatttatctgtgaggaagggaaagggatccaattatggacaggagatttctggggtgctggcaacattctattttttcaacgtgagtgatggttacatggccttttgcttttaaatttgtcattaaaatagaattgatattgtatatatttttatatgttatgttttattacgtgatttttaaaatgtagaaagaataggtatatggaagccgtaaagttgtatgcactgtagagtctgaatgcttcagtgccgacacatagctctaccacttcctagctgtataacactggccaagttaccaaacctctctaaaagcttttcttgtcatctatttctctcatctaaaatagaacccattccactatcaagagtttttcctgaagattaaatagtacttgattaaaacgctcaatccagtgattattgctttagcataaacttctttggactttaaagtgtttgtgtcttcttacctggcatgctcccctgcacaacagtattttttaatttaaatattttattttgagataattacagattcacaagaaattacaagagacagagattccatgtatctttaattcagtttctcccaatgtcaacatcttctaaaactataatacaatatcacaactaagattttaactctgatataatcaagacacagaacaattccatcacaagacatggtttcttcttatcctcacactgaaaaacaattccctttttaaccaggaacagaagggtaagttagtactttggaagtaggcttttatgagattaacgtcattgttcatgtttgataaaggaacactcttttctgaatagtgattttatcataccatattgcaatctaacacattccatccctaagtgtcacaagttttttttttaattaaaaagaaagtatatataactgctaaagatatttcttctgccacagactactgctgaaatgcagcattcccacatccctgcctcattcacgactacttcctatacattcaggaaaagacgtctttaataattatttttcctgtttgatatttttaaccatctcactgttactacctgcatgggcttccctactccagtctattttacatgtgattctagattattttttctgtatatgactttatcttgtcgctagtcagttcataaaaacactaatggtctcctgtgcatcataaaatcccaactccttgtagtgtcattcaaggccccaaattccctttgaagttttgttttctattagactttatcgagtgatatggtttggctctgtgtccccacccaaatctcaccttgaattgtgaaaatccccatgtgtcatgggagagaccccgtgggaagtaattgaactatggggggcatgtttttcccatgctgttctcctgatagtgaataagtctcatgagatctaatggttttataaaggggagttccctgcaaaagctgtcttacctgctgccatgtaaaacatccctttgctcctcctccaccttctgccatgattaggaggcctccctagccatgtggaactggggagtccattaaatctctttcctttataaattacccagtctcaggtatgtctttattattagcatgagaagggactaatacatccagctacaggaataacaacagattattgatctatttgggatacctttactgaaccttgcactttcttacttctaggcagtggcaaatgtcattttcctcaccagaagcatcttcctgagacataggtatttcacatattacctttcatgggagacttagcttcatcatatgacttattgaagtccccactaccgtatgtggaagacttgactgctctaaaaagcctgtaacacttctttagccagagtgattattccctgctagagggtcctgtacctactgtctactatttaattatgtcatttgtttggcataaagttgttgtggtgcttatgatccttgtttaacccttgaattgttatttaattatacctatgtttaactcttttcttacttccataaaggtagatattattcttattctgttcttacttcccaaaataccaagtatagtactttgcacttgattgactttcaatatatttatattaatctttttattaggcttatcttgattgctttgagaaccagagcatgttcaccagttcttaattcaagtgaaattcctaaaaattttagaagaggaaattagaccagaaacatataacaagagtagtgaccagagtggggtaagatggccagtttccacaactaaatttatatttgtatggccctgtaaaatgggttagcccctctaagaatccattccctcctctttacagcaatgacaacaacaattcttattttttggagttgtcagtgttaaagaaaataatgcataaaagcatgtaccctattgtctgtctcaaagtaagtgatcagaacattttaattttcttttttaagaaaggctctcactttgtcacccaggctggagtgcagtggtgcaatcatggcccactgcagcctcgacctcctgggcctgagtgattctgccacgtcagcctctcaaatagccaggaccacaggcacatgtcatcatgcccaactaactttttgcattttttgtagagacagggctttgccacattgctcaggctggtctcgaactcctagactcaagcgattcacttgccttggcttctcaaaatgctgggattataggcatgagccaccatgcttggcctgagcatattttaaattactttaaattattttgggctggtggcagtggctcatgcctgtaatctcaacactttgggagactgaggagggtggatcacaaggtcaggagttcgagactagcctggccaatacagtgaaatcccgtctctactgaaaacacaaaaattagttgggcgtgatggcgggcacctataatcccagctacttgggaggctgaggcaagggaatcgcttaattcgcctcctgggaggcggaggttgcagtgagccgagatcatgccactgtactccagcctaggctacagagatagactccatctccaaaaaaattaattaattaatttaaaaaattattttaagtattctataattttgaaaatacttacatggcatttcaaggactcaaaatcttactttccccagagctactcataaatcaaaactttgtttaaaataaatgaaaacagaggtacaacataccaaaatctctgggatgtagcaaagacagtgttaagaggaatgtttattgtgctaaatagctacctcaaaaagttagaaagatctcagtttaacaaactaacatctcacctagaagaacaaactaaactcgaagctagcaaagattttttttattactgattcaattttcgaacttgacattggtctgttaagggttttaatttcttcctgattcattctttggaagttgtttgtttctaagaattttctctgtattttctagtttgtgtacatagaggtgtttataatagtctctgaggatgtgttttgcttgtttgttgttgttgtttttggtaggaactgcctcccctaccccgccgaaaaaaaagaaaaaaaaaaaaactggaccaggtggattcacacccaaattccaccagatgtacaaggaagagttggtaatgattctactaaaactgttacaaaatatcaagaaggaaggactccttcttaacactttctatgaggccagcatctctctgatagcaaaacttgtcaaagacacaactaaaaaaggaaactacaggccaatattcctgataaacatagacacaaaagtcctcaacaaaatactagcaaaccaaattcaacagcacagcaaaaagttaattcaacacaatcaagtaggcttcattcctaggatgccaagtttggctaaacatatacaaatcaataaatgtattcataaatctccttgagttggaaatatatttaaaaacatgattcatcatataaatagaactaaaagcaaaaatcacacgatcatctcaatagatacagaaaaagctttcaataaaatccaatataccttcatgataaaagccctcaacaaagtaggcatcaaaagaacatacttcaaaataataagagctatctatgacaaacccacagccaacatcacacagagcaggtagaagctggaagcattctatctgagaacaggaacaagataagaatgcccactctcaccactcttactcaacatagttctggaagtccttgccagagcaatcaggcacaagaaagaaataaaagaaatcctactaggaaaagaagaagtaaaactatctttctttgctgatatgattttatgcctacaaaacccaaaagattccaccagaaagttcctggaactgacaaacaacatcagtaaagttttaggatactaaatcaatgtgtaaaaatgagtagcatttctatacaccaataatgttcaaactgagagccaaatcaagaatgcaatctcatttacaatagccacaaaacagtaaattcctaggcatacatccatccaagaaggtgaaagatgtctacaaggagaactagaaaacactggtaaaagaaatcgtgtatggcacaaatggaaaaatgttccatgctcatgaagtggaagaatcaataatcactaaaatggccatagtgcccaaagcaatttacagattcaatgctatttctatcaaactaccaatatcatttttcacagaattaggaaaaagctattctaaaattcatatggaacccaaaaagagcccaaaaagagccaaagcaattctacacaaaaagaacaaagctggaggcatcacattactcaacttcaaactatactataaggctacagtaaccaaaacaacatgatactggtacaaaaacagacacatagaccaatggaacagaaaagagaatctagaaatacagctgtgcacctacagctatctgatcttttacaaagtcaacaaaaataatcaatggagaaaggactgcctattttaaaaatggtgctggggtagcttgctagccttatgcagcaaaccagacccctacttttcatcatatacaaaaactagctcaagatggattaaagatttaaatataagatctcatattataagaatcctagaggaaaacttaggaaacaccattctggatgttgtccttgggaaagaacttatgaccaagtcctcaaaagcaattgcaacaaaaattgacaagataaacctaattaaactaaagagcttcagcacagcaaaataaactatcaacagagtaaacagacaaattacagagtgggagaaaatattcacaaaccatccatttgacaaaggtcaaatatccagaatctataagaaacttaaatcaacaagtaaaaaacaaataacctcattaaaaagtgggtaaaagacatgaacagacacttctcaaaagaaggcagacaaacagctaacaaacatgctcaacatcactaatcatcagagaattgcatatcaaaaccacaacgagtaccatctcacaccagtcagaatgactgctattaaaaagtcaaaaaacaacagatgctggcgaggctgcaaagaaaagggttgaatgcttatatactgttggtgggaatgtaaattagttcggccactgtggaaagcagttgaaggtttttcaaagaacttaaaacagaaccaccatttgacccagcaacccattactgggtatgtacccaaaggaaaacaaatcattctaccaaaagaaacatgcactcgtgtgttcatcacagtactagtcacaagagcaaagacatggaatcagcctaggtgcccatcaacagtgggttgaatgaaaaaatatgatacatatacactacgaaatactatacaaccacagaaaaaaccctgaaatcatgtcttttgcagcaacatctatgaagctggaggcttttgtactaagcaaattaatacaagaacaaaaaaacaaatattgcatattctcatttataagtgggagctaaacattgggtattcatggacataaagatgacaatagaccctgaggattaatggcagggaatggggagtaaggactgaaaatctaactgttgggtactatgctcactatctgggtgatgggatcattcacatcccaaacctcagcatcacacaatatacccatgtcagaaacctgcacatgaacccccgaatctaaaataaaagttggaaaaaacagctattgatacatgtcctgtgttctagttaaagaaaaaagcatcttcttaggcttcagtttaaaatgtccactacattatatttgttagtttttgttactctgtttaggaatctgaggtcaatgaagttaaaattgtcatgttaataggtgttttagacttaccgcttattaaaagtatgttttaaagctgaatcatacagtgttttatattatattgattttgtttatattgaaatcagcttaatatgatgtgtgtgtgtgtatcaatataatactagtcctacagtgtggttccacaattcatccttcagcccttcctccatatgctgtcaaatactgtttacctacaggatgccgggtaactctgtgtttgtgtgtgtgtgtgtgtgtgtgtgtgtgtgatctcacctatgttaaagttagacttcattctcatccacctctcaattagatacatcctggatactaaaaagtttttgagcagttgaattaactgtcacaaatatcacttaatttcattctcagcttatttgccatgtattcatcttagtctaagcccttctttcaataactgtctgctcttcctatatccatagttccagatgtcaaggttatctagcttctcaacatagattgctaagggttgacttactagagtcagatagacaaaaaaaaaaaaaaaaaagaagaagaagaagaagtaaatttggagaaactgtcactgagagaggatgtagaagaactcaaacaatgacacaagaattggtaaggtgcagtcactgagtgatgtttagggtaaaagctgggtaagaaccctgtatctcatcaatcactgaagcattatagaattagagaatgtagtctttggtgtccataatcaaagtttcagtcttcacaaaatgattcaattatattcattatattctgtgtgagaagacaggtaagtgtgtagaacttactagaaggatttccttcaaaagtggttaagatttttagagttcatacttaaggggatgagatttagtttcaatgaaaattaacttctataaaatatctcatttcccaatatgtcagataaatgagatattatgcacataatcctaacataaaagacattctctgttccccaattatgtaagaaaagggaactattgatttaggtactttgtatctcagttaaaaagcaggtcaaataggtagcatttcaagggtcttatggtttctttaagagattctgtaacacactatttgtacataagatttttttaggatcaactgactgcttcacagagagcctgacatgtaagaattttttggtcattgttattacctgatcatatcttttttccctttaaattttctatgtattataggtaggtggtgttttcactatgtgtctttcacttcttagctttaactcatttgtgtctttgtgtgtcaagtactacatagaattaaatcaaataccttccataggtattcataaagttaccatagatggtcacaccagaaataaagaaaaacagatactggcagccacatctttttgtgtgtttagagctataagtggtacctgagagtaaaataaaagatctttcccaaaaatttggaaataagggaaatggacttatcagaatggtaaactatacaaggttgtcttcttaaaggaaaatgaatcacagcagtggctttttaaaagtattaactcatttaacaaaaaatgctttaatcctaaatgaatgtattgtcctagatctgattggtataagagaaaacatttcagatattcaaaacagagggtattttatacaagtaggttgttctcaaggtgttgtaaagaagggctggaagaacaaaagggaaaggtggcaggtactggatggaagaaaaggatgattgacaggagctggtgcttactgctacacttgccgatttgacatttgaaccattatgggacgctgccccaaccagagctgaaatgccaacaacattccactaccgaagaggcagaaaatgcagaagagatgcttcttctgtctggaatgcttgaggctgcaggtgctttgtcccctgctgacacagcagctgtcaacaaagccctcagctcttggagctagaaactggacgttttctttcttcctgcttctgtcctcctcacagtgcctcccactggcaaaacccaatagaaggccaacaagcaagagagttggaaatgtagtttgtagtttgtaggttcagccgtacagaacaggctatagaagcgtggatgtgtagctggggcggacgtcagatgaatcaccttcttagctactcggcattcacacacacccttgtacttttcaccacctttcattaccaatagcaatcactctatgcttccaatgaacatgatactactatgctttgtacaaatgacggtgctctcacctccctcatcacattcttatctgggtgatgttaattccccttttagttcaggcacaacccatctggatattcttcaacataaaaaaactaaactataaattaatacccactaaccctatttacatgaatcaatggggaaaggaggacggaaaattggctacaatatacaaatctctgtgtcataagcagaaataaaatatgatagcatttataattcttgtttatataattagttgtgagaccatagctgatatttacaacttcttctctttgccctcagctggtagttcatttgtttgtagttcttttatttttattttttgtagagatagggtctctctatgttgcccaggctggtcttgaactttggggctcaagtggtccttctgctttggcctcccaaagtgttgggattacaggtatgagtcaccacacccggcttatttggaattttttacttaggccactggatcttcattactaagggggtctatgtccttcctgttctatcttgattgggttgctgcagattttcaatgcttatatgattggacctggtcatataaagagatgcccttttgaatgtcctgactgacaatgtgcagtaggaagccagtttctcctccaatatgataccttttctctttgcctgttataggaatgctatgaagagagggttaaaaagaagccaatgtgtaccaggtgcttagaacagtgcctgatacattatgagtcatatagaatgcattaacaaataaggtcgatttacttctggggcatatctattaagaatatcttcttttagaaagcaatacaaattataagtatgcttcacttattaatttttgatctggaacacacatgacaacagttaacaggatgcaatagaaagattctcatgctggaactgttgggttctatttctgtctctgtattaattaggtttacagtttgatattcaagggtaacatctattttatcctttggtaagagacagagtttagacaaggagaaataccagagtctgtgatttaatgattccatgaaactagaaatcacatcaagagtgcttgctttcttaagaccttctttgctattgtctagtagtcatactgaaaggcaattattatcttcccaggtgttatcacgagttatggattatatctagatggtatattaatccacaattcctcagaactcagctatcgtgcttacggatttgctccttggagtttacattccttcagagtccaagcatgcacggccaaaggttgtgctctgggcccactggtgagtatctaaatttacattctaggaatgtgttaaatgtcagatgacactgaatattaaggaagaagtaagtggcggtgactcaccctctgcacagctagcctttcaagcaggatgggagatttttctttttataaaagttcatttaagagttactaagattttatattcgacataaatttcaagactgaacataggtccagtgaagggcagagtctacattttattgaaagaaagataagttggctagtgtagtaggcaaacatgaaatttttcctaatttagtgacatattgaaggcagatgtttttctttctaatcatgggctcaacatctaagtaagtttaagattaagaagtaaaaataattgaaagtccataagtgccacaatatggcaacactgctccccaaaaagtaatcaattaaaaggttgagtttacctcatctgttaggataaaatagtttcatgtgatacagcttcataagaatggtatttaaaattacatcaatatcagcttttgatattcatatttcagaaatctatatctgaaatgtatatctatatttcattagcagttaacagcttgacaagattatgttttctattcctaatataatttttcaaacccaattaatagcacttaattatcataaactagcaggacagtcttcagtttcaaaacatcacattacactttggtgcatttttcttgattaattagattttgcttctttagatggaaatgctcattagtcttagatattttttggcaatgtttgctaatgccctatcattttagtgcatgctgtcttcactgaagagtatattatataaatattaccttggaagacagctctatgttttaatttctgcttccttatttttgatcacacctctctttttgtttcagagattggttgctttccaagcagctaacaccatccatcggcggagctgagctgtagtctttattgccattaagcattttatagcccagacccctctgatggatacttacccttaaatgcaggaatggcaataggccagcttttcttatccattcaaaaaaaaaaaaagaaaaagaaacaaaagaacacgtcacatgagattgaaatttacactttttgaaaatgtaagctgcaaatggtagttctggctacaaaattggctcagcggtgtctcctgatgttctggcaactttaaataagggggacctgcattatcaacctgcatcctgcacagacagtagctacgttaaccttaagaaatcaaatgccacaaagctctgataggaaggggggaatagaattgggttgtaaaacctagtctgccatggcttcattcattccagactcaatcctgacttacagcacagagttattttctcccttggtacttttctttatgctgtactcagtatgcaaacgcttttccctagtcaatgatccatctctaatcactgggattgaagagcaatgtctttatttagaacaagtcaactatatgctaccaagaagttaaagcccatggtcttcaactggtttgtgaaatatttttgtgcccattaagtgattccatatctgagtattctaaatagccctggatggctagcacaatcatgaaggatattacagattcagcttctttttgttgatgattcttttaatgtgtccttattgacttaagaaatctatgaatcaatcttaaaaggcagagttttctatcattaaattatgatgtgatactcaacaaaattcagtcaaacgtggcaatggtgtacaacggtttcttaagatattcatctaaatagagcccgatgctatgacattttaaataaaaaatttcattgaaacagaaaatttatcatttctatttttaaatattttgctggcagaaatcagaataaattttgaaagagttcaatttttttgttcatctaatatttcttaatgataattcttgttctttagattatccacacatgcagggaaatactattcaatgttttctatgaggaatatgcttcacagtcccaaatatgatatggttcatcctccaaattgcaaattgttcatataataaaaaatatgaatttgatggagaatttttaaaaataaaaagacatacagaagttccatattcttaccacttgaatgtagtattagctcatttttttttctaatctgaccagtttgttagctattatttatggttcagaaggagttgccctgtacctatctggaaaaaacaaaaacaaaacaaaataaacagcagcaacaacagcaacaaaaaaaacccacaatgattctcctgtggtttttttcagttcttactcaaccaaataatgtatttgactcttatggaaatttcaatatagaaaacaattgacaaagcctttgaacctaatttttagatgctaatgtgcattgtcaagttaaattcaataaattggggttttataaattttgaaataacataaaaattaacagaatgcagcaggaactttttaaatgctttccttgctttcaattgtattagagggaaacccttcacattttgtaatattctttaataaaatacaataatgttttccataagaaaatcactttgctttcttactccccacttagccaatgttacataacactagtggagtctaagattgagaattttatgactgtgtcttgtattgtaacattcattggatcgattctccagggactcttaaggatgatatgcgagactataggtcattgctatgtgatatggctaaaaagttgtcttggttccttagtgatgtcatacttatacagataaatacacctggataaatacacatgtacaaacacattcaccctttcacattttttttttttgcaaagaagcaaataagtgtgttatttaagacatctaaatcttaatggcaatatataatatagtcaagcaaacgctataggggaagtctgccttcaacctgcttaaaccccttaaatccctatacccccttaggagatatacttattctacaaagcctcagatttctcaactattacaaagagaaataatgtctactttaagagagttggtgtaaaaaattaaatataacttacacaaatttctggcgcattgcaagagttttattaagaataacagtttatggccaggcatggtggctcacacctgtaatcccagcatgttgggaggtcaaagtgggtggatcacaaggtcaggagttcgagaccagcctggccaatatgatgaaaccccatctctactaaaaatacaaaagttagctggatgtggtggcgggcgcctgcagtctcagctactccggaggctgaggcaggaaaatagcttgaacctgggaagtggggattccagtgacccgagattgtgccactgcactccagccttggagacagagtgagactccatttaaaaacaaacaaaagaattacaatgtattaaagtgtttgtatgttttattgcacatttgctctcaaatattttttctgtgtcaagagaggttcccaggccaaagccaagccaacttttacctttcccaagtgccttttccacatattccttttacagcaaggtagataaacaaaaaagtaaaatgaaaaagaaagaccaggtcagagcaaaatagtacaattgccaaattcaatgtatagtaaaaactgaagtgtttatccaaatatttaaggaaatgttacaaaacatatttattttgaattaaccaaatatttgaggattataatataattatctggaattgcccttaattcttcaacttttcaagtctcattttatttggaatgctttaaaatcattctatgtacaataatatgaactatatagataggcataataaaacaaattacattgtcataaaatattaaaatgatgaattgatatttttctggcctagtttcatcatttttgtatgtagctattaaactaaaaacgaaagagcaagtgttatagttctaaagaatcccatagcttttctctgatgaaaataaaacatgttgtgacctcatagttattaaaaattaacactttctttttcacatttattttcataattgataaggtataatcaccctaacaaataaaggttttctaattgataatatttctgcctaaggatttcatgtttgatcacctccttgggaggcaagagcttgtaccttaagaataaagttgaaattatcacatatttagtaaattgtgaaaggtcaaatatctatgagtgatgctgatgagtttgtagtgattagttaactgaatttaagctaatgattaaaagatattaaaaatttctgaactcttttctactttcttgccaactacatcttcctctgaccacttattttacttatttatctattgaaatcttcctgaccccggtacagctagggattgcattttatttcagagtctttctcttcaaataattcatcttttgctcttttctgcatagcttcattaacacaatcaatatttttttgtgattgtgccttagggatagagtccctaggatgcatgtatttcttaatgttagcatgatgccatttttacataactgatagcaacatagctcataaaaattttgcgtgtgtgtgcgtgcatgcctgtacacacatgtatgcatgcgtgtgtgtgtgtgtgtgtgtgtgtgtgtgtgtgtgtgtgacagagaagagagagagtcaagatatgtggtgtagctttttgacagaggccagaagtctaccacctaagtcaaggacttataaaaacagactgcgtgcatttcttctcttttgcaatcacataaaaattattttaaagcagtcctagaattggtctatggatatgtacagccataggcacagtcacagtgtgagcagatccacatattctggaaatcacaaatagctgccttggtcaagagctcaaattctaagctttaacagcagggggaagaaaacatgaggtgtgctttgatcctgctgacaaaatgaggtattcatacaagatgctactgtcaaaatagtttacttcacagcaaaaagagattctttgaagaaatatgctcaaagcgaagcatgtacttattttatttgcaaacaaaaataaatctttttatactcacaggtggaaaatcgaactctagaagctcctcctgaaggaacagtaaatgtgtttgtcaaaacacagggatcccggaaagcccacgtgaggtgggaagcaccttttcgccctaatggactcttaacacactcagtccttttcactgggatattctatgtagacccaggtaatttgtttttattttctaaactttaaataacattagaaaacaactcatttttatttaaaatctttcttttggctaaaatctttcttttagccacagatgttggtttctttattttcctgaaaataacctatacggataagctactgcccgacggttctcagaatgtggttcccagagcagcagcaacagccacatctgatgaacgcttagaaatgtacgttgtagagcttctgccccagcctagtgaatcagaaactctagaggctaaggtctaacagtctgtgtttaagcaaaccctttaggtgacacatgctgaagaactagtatatactcttcttcccttgctaaaaagtggttcaaacctaaaacatcgtgtatgcaaagagttgaactataattttgcagtccatcttaaacaagccatttttgtgactgttttagatttctgaactatcttagtaattctgctgtgtgttctgataaatttactgaatgtggattaggctacatggggttccttgaaagtattttcaaaaactatctgattcaataagttaggtgctatggtagcatgatgtttattttaagcaaactctaccataaaaagagcaggtatatattttaatagaaactttggatctgtattaagtgctgttgtttatcatcttccaggagtggccttactatttttgtaggaggaagtttgaacctttatttttaaatgagtagcaaatatgcaatatcgtggattcagtcagacatgttattagcatgttagtctgttgcttaggcttgaaaacgtttctttgtttctgaattttctatgagtctttgtaatacttaataacatcctccaagtgtaaaaacaggtgaagaaagaaaaaaacaggcttttctaaatttgaaaagggtggttatttgtgtactgcactggcaagcaaatgcgagtcaagtgcgtgtcagagtctaagctgatcccctcaaagattggtgtgtcccttttttatgcaatcagggctttcatgtattctgctgtaaagcacttgtaagattatgaggtgaaggagtgatgatcgatttgaaaaaagaagcaacatttaggccggacccatgacagcccagctatttccgccaaggcagctgggtgaataatgcaagagccatattccccctcgtgtttaatcttgcattgtttttgcagagaaaatttctgcttgccttctaagtcatgtcatcttcagttgtcatcccgtctctcaaaccatcaaaacggtattaaatgttgcaaagctgcgcggcaagagaactttcaaaagtcagaacccatttaccgaacagcccttgtagaaaatgtattctgttctcggcagaattttccttcagttctttccactgagaagtttactgatttctcccagtggaatctgctggaatttatcggttcatggttggcagtcacagattaaggtaaatgtcgatccgtaatgaccctctacatgttagtattgcagtaaagctgggcttttatgtcaaagatatcggagagggagctattacacatgacaggggtgatcaagggactccagaccaaggcaagcattattaaatattgactagttctgtgatttatgtagagctggaggaaaaaagtgactttttaaccattatatattcttcagcaacgaaaaccagccatttatctcctgctggtaataaagaacagagtgcctgcatattttagtggagggaaaacctggtcttataaatgagatgaactccttcgtgataacatttcagtttgttaattgccaaaagcaaaacagacaaattggaagcaattacgagatttgacttaaagaatttttgcggtacgggttcaactcaggggttggaaaggggtgaggttggaagcaaaaggagcatctgagatgggccccaggaaaattcgtgtcattggttcactggcactggaactctcatgtccactgttaactgaaaggattttgaatattgtcttgtcctgtcacccatcagcagctgggtgacatttacactgagggtagggaggtctgcatggctctacaagaacaaattaaacattaattcatcaaacttatttaagatatcatctgttcactagatttatacaaagcttattgaattgtctaatggctaattggttatttccttgacataatgaacaactgtatttcatcctttcctgtgatggctgctaaagagggggtggttagaatttataagatagggaaattcagctagttcaaagcaagtgtagtttcaacataaaagtgcctgcagctgggtcactattttgcaggagaaattgggctgtgtctgtaagacaccctcatgggaaccctattcttcatgtcaactcgtatcctgaactaaaaactttacaaaaacattaggtttcgtaacaacaagtgaagtggcacgtatcaaagtgtgatttttcttaaaaattgttcacttttgaccacgtattatgttctcatgaatcaaaatttaaaagatagaaaaaaaggaagtaaagtaccaagcctgttctgcagtctcagaggaaaagtagtgtgctcagcttcttatatccttctagaaatatttgtcttataggtgtgtgtgtgtgtgtgtatacataaacaaacacatatttcccccatttgtaaatacatatagttttcatctcacacatgcaacattttatactaatgataccaagtggtacacattattttgcaccatgctttttttccatcttaataatttcagagaaattatcacagcaattcctaacgagcttcctcattctttatatagcttggtaatattcaacgggttagagcataccatcattggtttaaccagttccttattaatggccatttaatttgtttctaatcttttattatttcaaataatgcctcaatgaataaacatatgggaatgtcctttcacactttgcaagtaaattaatacgataaattccttgaaatgaattgccaggtcaaggaaaaatgaatttgtaactttgtaagatactgtcaaatttcattccatagagaccatataatttatattctcagaaaaagtatgagggtgcctgtctccccacagtcttgtcatcagagtgttgtcagacttatctttgccaattcgatatgttaaaaatggtagctatttcacagtatcttgagtagttattaggaattagttggaacttatgaacatattttcttaagtttaaaaactgtgtttcttttttttgtgaatgcttcatttgtatcttttgcccacatttttacagaggtttaagaagttctttatatattaggaaaatctgttatattagtagaaatttttcccttcattattgctttttcctagcactctactgctttcttttataaaatatttatattcagttcatctgaaatttatactgatataatatgtcatgtatgggtcaaaccttattttcttcccagaaaattttcctttctctcaaaaccatttactgaataatccttattgttccccactggcttgggttgtcatctccaagagctcctaaatttccatctttattaataaatacgtgtggacatatctgtacctttatttacattatcaaggtatcttaatgattaaaactgtagaatatattttattgccttgtagatctagtcctcttcattatttttattttatataatttcctacttattatttcatatttatttttttcaaacaatatttatatatttctaattttaccccagaagtcctgatgctgtttttataaggatggaacagaatttacaggtgacttaggtagaattaatatctttatactgtcgggtttttctgatcaatgatatcattatactttctattttgtgtcttttgtgtctctcgcaagagctcaaagttttcttcatatagatcttgcatatttctgttgtgtattcattaatattttataattatacatgatttaagtaattatgataatatatacattttacatattaacattaaaattaaataactgaaaagagctactttcaataattatatgtagacttcactcgcagatacctgtcttctgaaagccacgattttaaatgtttatatctattagatgatcgttcatctaacttttacaaatatttgaagtttttttgctgctaagattattgtcattttctctaaaatgcaggcatcttaccaggggaaaatgataatctaattaattagactctcaactagtttgtggtgtgtaaaatggcaacaaaggttggacctgaagaatctctgtcctgacagaatttacaaataaaaaagctaaggcagacaaacttagccaagttattctcaagtgcatgaggcaggaaagaaactagatggtgtgacaagtggaacagaaataattaagggaagattttggtaatactgggtctttctctttaattatggatgagaataaactgaatatggaaaaactaaagagaatgacggagagagcacaaacacatgtgaatggcaaaaattaacagatcaaccaacctacacttggttatattagaatgtatttttgccatttgctaacatccaccataaaagtaaggattagcacttttctatgggattctacctgatttgaaacatctattcaattatgaggaacatatgatcaacaaattagtttttctagggtgtgcaagtgccatttactgacctggaataagtgctttgctcaatgactctcaagggtgcaccattcaccttgcacaggtgaatagtcaactcccagtgatcactttacaacatcttcagtattttttcacacatatgaattaactatcaatttaaattatagataacaggtttataatcattccttgtgaaacatattgaatatataatttttaaaaaataaaacaaatgtgtaagtttgggaatacaaataaaactttacagcatagtagtagcaacctggcttatgtaaaactatttataaaattataaattctattccatttaactggtagatgaaagtattgtgccatgataatttagggttacatcattattttacagagcttcaaaagtattctcagctacaaatataaaacaacctaattgtcaagaagaaaaataaaaactatgaaaagataaagaaaatattctgagatcctatagaataatttttacaaatggcagcttctttactactagacttcccttggattcttcacactgatcctgtacttagtagacaatgccatgtcttagtacacatatcctgcttttttcttaagtggttattgtggagtcctctgcgaattgtttaattcttcattatccttccttttgaatgaattgggacgtgatcttcattgcttgatatcctgacagattgctttgtgtcagagtttctaaggcaaggcaccagcgtgtgctaattgctgagtcctttgtgcactgttaactctcacctgctctgaaaaactggattgcagcttagttttcatcttcaaatgtctctttctcctaatcccctattttgtgctgtgccacagaataaagatatttatttgaaaaagagagatatggattactgtgggggaaaaaagagggtaaatgaaaatgatccttaagcattagcaaagggaaatggcattttagaaaaacaaaagaaaagcaaagcagaatgatcagtttttaatgttgaaactgaatcatttcatggatctcagataactctttctgaatgtggagaggtacaacaaacaggttttaggtgacttttcccagagtaaatatgtctaatccaaaataagtcctcaaaagtaagggtggaaggtaaggaccgggaaagaaaggaaatggaagatagaaagaacaatttttaaattgttaaatgctcatgaaatgagcataatcagatgctttttatttgcttataagacctgatggtcctgaaaaaaagaaacccaattagtatttaagaatgtttttaaaaaggcaaatgaaaatttgggaaatatatctgttatctctaggtggttatattatgaatggtttgtcttcccatttttccttttatatgtactcaacttaaaaaaaattctataatatatacatattatttttgcaaaacattataaaaaatagctcacaagagcagatgattcaagagcagagtaatttggagtaagcatggtgcttctggctccaaggaggagatccgggtggtgagtcagaagtcctaaggtggaagcttacagaaagaagggcatcttcacatatttccaatgattattcaggaaaagtcttttggtgacttgtgggatgttaaatttaactttcttcttatgttttggctgcatatgtttttccaacagttgctaggggtaatcaaacaaaaacaccaaggattctgcaaaacagaaaagaaaactaaataggagtggtcagagaaataaaagagcctctttatacctgagacataatggtagtgttaggggaggactgaggcatgggagatttggtttttttgaggttacattgtggggatcaggaggggcataaagtttttactgcagtggtaacatctggaaggagtggggtgccttaaagaccgattaggatatttccaggtagaaaagatagagtataaatgtgatggctccccatcccccattctctgagcctaaactttttcttctgttataattggagtccatatctcatttcaatattggtatcaagtgtttgctctttgggataaatccccatctaaaaacaaaagaaattaaaggggaacggaaactgcagaaatgcagaaagtatttcattgctggtttaaactagatgaaagtgtatttttaactacagttccgaaaaatcctagcacccagaataggcttaccttctcctggaattgccagttaccagaaagagtgctttagaatgtcagtatattcaaatgctctaaatctctaaaaaatcttgaaaaaccaaagaaatgcagttgatttttcaaggttacccagagaaatccagtgtccttttcacacactctggttctctgggtgcttttctccccagaatatactgtgttttataaaaattacaagatggaaaaaaaatatacagaagcgtttattttcttgagaaggtaaggaaaataattatatgtgggaacctcttagacttccaaagagtctgtaggaaggctaatgctgttaggaaagggacagctttgttttatagtccctggtatctgttttttagtgtggagggaaatctgcggtttcagagctgtgcttgcaacccatgcagtatatctgacacgctgccctctgggaaaacccgccagtgggggaattgttccagtgatgcagtacagcttgtaacttggaatcccgtcggagaactttgtagttgcttgtcagtcagtgggaagataaaagaggcagcttcttttcaagcaatctgaattcattttcccgtaatgagttagggggtcaggcagcaggagtgagttcacctgagatcttataaagtatatttcctggtggaagaaagagaggaggagaaaagggaacataacgtccaccacgcagctgtagaacggcgtaatgtggcttgtcgttggtctatttctttttatgcccacatattctgatttcagagcatatatttttagaaagaaaggtcaaagaaagtacagctttatctcatttaaaaatataaaacccaatctgtgaaaattgaaacccagttaaagtctaaagcagcaagtgatagtgtttcatacacaaatactcatcaagcaacaacatgttaaagatattgtactatgtcttctgacattacatcattattaaccacacaatttattttagagacttagaagaaattaaatgagtgtcatgataaggagttcttttagttacagacaacagccccagacctctcttcctgaccatttcagatgttgtttctaaatcagcacaaaagatattaggaataaaaactgtgggagaatgttcttatggtcaaagcaagtattaatataaaaaacattgggaatgtaggggaaatagagaaaattactctgtttctatttgtttggaagcaaatgtctcttatgcaaaaaagaaagtatagttattatatctttctgtaagtttccaacacatttctggatgtataaatacatacaaatctaaacacttgggaaatcaaaaggcattttttctggactacaaattatggccatattgttaatgaaaatataaacgggcaataataagatatctgtcatttcaaatattgggctatagaatgtatatgcactgaatgtattgacacttctgattgtatatcatgtcatggccaataaagctatagaaatgtttaattaggacatattcttccacaagaatggagttaagcattaatttatcaaacttgtttaagacctcatctgttctcaacactcacacagcagcttattgaatttgtctgatatctaattggctattttcttgacataatgaacaagtgcatactctatgctgttgtgtctgttgaggcggcgatgtaatgatgaaatggaaattgtaaccatgggtcgtacactgattcaggatatgcagcccacagagccatgagagggcacaggatttcattgtcctcatggcttaactttatgtttcaaactctgcagagcatctctgtggaggaatctctccattctaactcctcatgaaaggagcctgttagaagcaaaatacaatcagcagatcacccagatgatgtacctttggctttggaaggctttgcataatttaaaaaataaaataaaattctcctatttagagaaatttttaaagcatttaaaaatactcacaccattttcaaacccacaccacaagtgatttgggggatttctaatacatgcatgataaagttcaactggataagccagccgtggggcagatatataatgtttacctatagttgtgtaccactgatatgcctgtctagtgttggtttttgcatgctttgttgtggcaagagttcagtgcttgttgaataaatagtaatattagaatcagtgtttagattttggtagactgaacatatagccattttacctaggaggttctcagtaggaaagtgtcagctgtgaattgatgttagagggaaacagaagaatggattacacagagaaatagaaaaaaaatctagccatctggggccaatgtccttctctagcctctaagacacaccctacagcaaggaattcccttctctgattcctgaacttctcctgtgggaatctagggatcaacttccttggatggtgatgggtccttatcattatacagagttatgaggattacaaaccatatgtttggccccttagaaagtgataataggtgactcctaaatcatagttctatataccaagaacagcccacatcaaacatatttcccaaatttttgtgtgaaattcttcataatcaatgtgttactttactcaattattagtgttgcagaatctaaggattctagtgggctatttatgaaaaaaaaagtatatggcttttagagaatttggattctttatttataaatcgggttgcaaataaaatttatgtttttccttctagcaatatgcctttggggagaagcaaagggagttttacacccaagaagcagaaatcaaaaatcatagaattaaattaagaaatttatttgtttatttggacattcattcatttgttcatgtagaaagcatgtatctagcttgttttatggaacaagacagaaactaaatgatagctgctggagttgagtagagaaattttctctatccagagttgaatcatatgttgttttattgtgctaaatttgttagacatttaaatttatacgaatgatggtgcctgtttctgggatatttattccttcccattgtaaacctatttctccaaatcatcactatgctaacttaatcactatgctttcaacatctgaaacatttagaaagtacttaaatatctggcaagcatggtctgtgtgctgaaggggcttgtggtttaacaaggggagctagaaattacccaagtaatcatatagaaatataaaattacagactttaataattattaaagtaaaagtatatataactaagattttcataataagaagcttaatataaattggagggtcaagaaagtttctttgagctgatgacatttagggtaactgtaacatgactagacaccaactcagaaactagaaagaggattccaaagtgaatggcatttgtaaaggatgtgaggaaggtaaaattgtggtggatttgaggaaatgaaagaaggacattgtagctaggctagggagtgaagaaaagaatggcacagatgagactagaaagttagacaggagctacttcatgcagcagactgttttaaggactttggcataaagtaaaagtgtagttgcaataattacaaaaaattttcaaattttcaattgtttttttttattattattatacttcaagttttagggtacatgtgcacaatgtgcaggttagttacatatgtatacatgtgccatgttggtgtgctgcacccattagctcgtcatttaacactgggtatatctcctaatgctatccctcccccctccccccaccccacaacaggccccagtgtgtgatgttccccttcctgtgtccatgtgttctcattgttcaattcccacctatgagtgagaacatacggtgtttggttttttgtccttgcgatagtttgctgagaatgatggtttccagcttcatctatgtccctacaaagtacatgaactcatcattttttatggctgcatagtattccatggtgtatttgtgccacactttcttaatccagtctatcattgttggacatttgggttggttccaagtctttgctattgtgaatagtgccacaataaacatacgtgtgcatgtgtctttatagcagcatgatttataatcccttgggtatatacccagtaatgggatggctgggtcaaatggtatttctagttctagatccctgaggaatcgccacactgatttccacaatggttgaactagtttacagtcccaccaacagtgtaaaagtgttcctatttctccacatcctctccagcacctgttgtttcctgactttttaatgattgccatcctaactggtgtcagatggtatctcattgtggttttgatttgcatttctctcatggccagtgatgatgagcattttttcatgtgtcctttggctgcataaatgtcttcttttgagaagtgtctgttcatatcctttgcccactttttgatggggttgtttgtttttttcttgtaaatttgttggagttcattgtagattctggatattagccctttgtcagatgagtagattgcaaaaaatttctcccattctgtaggttgcctgttcactctgatggtagtttcttttgctgtgcagaagctctttagtttaattagatcccatttgtcaattatggcttttgttgccattgcttttggtgttttagacatgaagtccttgcccatgcctatgtcctgaatggtattgcctaggttttcttctagggtttttatggttttaggtctaacatttaagtctttaatccatcttgaattgatttttgtataaggtgtaaggaagggatccagtttcagcttctacatatggctagccagttttcccagcaccatttattaaatagggaatcctttccccatttcttgtttttgtcaggtttgccaaagatcagatagttgtagatatgcagcattatttctgagggctctgttccattctattggtctatgtctgttttggtaccagtaccatgctgttttggttactgtagccttgtagtctagtttgaagtcaggtagcgtgatgcctccagctttgttcttttggcttaggattgacttggcaatgcgggctctttttttggttccatatgaactttaaagtagttttttccaattctgtgaagaaagtcgttggtagcttgatggggatggcattgaatctataaattaccttgggcagtatggccattttcacaatattgattcttcctacccatgagcatgcaatgttcttccatttgtttgtatcctcttttatttcattgagcagtggtttgtagttctccttgaagaggtccttcacgtcccttgtaagttggattcctaggtattttattctctttgaagcaattgtgaatgggatttcactcatgatttggctctctgtttgtctgttattggtgtataagaatgcttgtgatttttgcaaagatactcctcgagaagagcaactccaagacacataattgtcagattcaccaaagttgaaatgaaggaaaaaatgttaagggcagccatagagaaaggtcgggttacccacaaagggaagcccatcagactaacagctgatctgtcggcagaaactctgcaagccagaacagagtgggggccaatattcaacattcttaaagaaaagaatttttaacccagaatttcatatccagccaaactaagcttcataagtgaaggagaaaaaaaatactttacagacaagcaaatgctgagagattttgtcaccaccacacctgccctaaaagagctcctgaaggaagcattcaacatggaaaggaacaaccagtaccagccactgcaaaaccatgccaaattgtaaagaccatcgaggctaggaagaaactgcatcaactaacgagcaaaataaccagctaacatcataatgacaggatcacattcacacatagcaatattaagcttaaatgtaaatgggctaaatgctccagttaaaagacacagactggcaaattggataaagattcagacccatcagtgtcctgtattcaggaaacccatctcacgtgcagagacacacataggctcaaaataaagggatggaggaagatctaccaagcaaatggaaaactaaaaaagtcaggggttgcaatcctagtctctgataaaacagactttaaaccaggccgggcgcggtggctcacgcctgtaatcccagcactttgggaggccgaggcgggtggatcatgaggtcaggagatcgagaccatcctggctaacaaggtgaaaccccgtctctactaaaaagacaaaaaattagccgggcgcggtggcgggcgcctgtagtcccagctactcgggaggctgaggcaggagaatggcgtgaacccgggaagcggagcttgcagtgagccgagattgcgccactgcagtccgcagtccagcctgggcgacagagcaagactccgtctcaaaaaataaaaaaaataaaaaataaaaaaaataaaccaacaaagatcaaaagagacaaagaaggccattacagaatggtaaatggatcaattcaacaagaagagctaactatcctacatatatatgcacccaatacaggagcacccagattaataaagcaagtccttagagacctacaaagagacttagactcccacacaataataatgggagactttaacaccccactgtcaacattagacagatcaacgagacagaaagttaacaaggatatccaggaattgaactcagctctgcaccaagcagacctaatagacatctacagaactctccactccaaatcaacagaatatacatcctcttcagcaccacaccacacctattccaaaattgaccacatagttggaagtaaagtactcctcagcaaatgtaaaagaatagaaattataacaaactgtctctcagaccacagtgcaatcaaactagaactcaggattaagaaactcactcaaaaccgctcaactacatggaaactgagcaacctgctcctgaatgactgctgggtacataacgaaatgaaggcagaaataaaaatgttctttgaaaccaatgagaacaaagacacaacataccagaatctctgggacacattcaaagcagtgtgtaaagggaaatttatagcactaaatgcccacaagagaaagcaggaaagatctaaaattgacaccctaacatcacaattaaaagaactagagaagcaagagcaaacacattcaaaagctagcagaaggcaagaaataactaagatcagagtagaaccggaagacatagagacacaaaaaacccttcaaaaaaatcaatgaatccaggagctggtgtcttgaaaagatcaacaaaattgatagatcactagcaagactaataaagaagaaaagagagaagaatcaaatagacgcaataaattttcaattgttacacagttgaatattagttacatttagtagctaaaggcttagattggagtgtcttttttcttcagagacagttttgttaaaatggtaccagttagaccaggtgcaggggctcatgcctgtacccagcagtttgggaggctgaggcgggtggatcacaaggtcaggagttcaagaccagcctgtccaagatggtgaaaccccatttctactaaaaatacaaaaaaaaatattagccggacatggtggtaggagcctgtaatcccagctactcgagaggctgaggcagagaattgattgaacccaggatttggagattgtagtgagccaagatcacgccattgcaccccagcctgggtgacagagcgagactctgtctcagaaaaaaaaaaaaaaaaaaggtagcaattataaatgtgttattggcttgcagtcattttttctatggagatatacatatgtgtattcatgtgtttgcatatataatgtattgagatcttactacaaacacatatcatattttacacatttaacattatatcatgaatgtttcttgtattacacacaaaaaactcataacaagtatttaatattcaataggtacttaatatactatagtatagatgtgccaacatgtatttatcaattccttattgttggatatttaggttttttattcttactatttgaaagaatatttattgttaacacatacttctacatttttccttaatatgtataacaacaaaggaattgctaaattaaaggttgagtatatttttgaagacacttgatatgcatggcaaaatgctttcaaaaaaattacatcatttcacatggcttctaatagtatacaaatgtgttcatctgtctgtagttatatgcatttgatagataaaaatggtaggttgctctaatttgcatttcttttattcctattgagaccaaacattttccatatgttcttttcctatttgtttgtctttctttttttgtctgctcacacactttgcccagaatattttagaggttttaaaatttgttttggtatttatggaagctaaaataatatagatagtaattcttagtcattacaattttaaatattttatctgatttatctttttggtctttttatgaggtttatgatgtagtacttcagatttttgataattaaatctttgctaatttatttttataaaaaatattttctccgtctacagttgaaacatatgttgctttattttgctaaatttatcagacttaaatttgtatacatgatgctgcctgtttctgagctatttatttcttctccttttacctgtttctaatctgattgaattgtggtgctttcaacatcttaattatttagaaaatacatttgtatcttatgggtaaagtcattattttctcccttcaggttattattcatttctgttaaaaggtcttagttcttttcatatgcatattcttccagttgaacattagattgagttgaaaaaatgacagcaatatttttaatggagtctccttcttatacattaattcttctgaaacttacatcttaaaatatttctcatctagaaatgtgttatttttccatttacttaagcagcttgtatctccattaaagttttgttattttccccataaggacctcacattttttgttagggttattccaggtatttttacttttgtgatggtgttcatttatttttattataatatttaaaaaatctctggtattacgtcagtgtttttaaaacatgccatttttattcaatactttaaaaatatttataaatctctgagttggcaatttctccagctctaggaagacagaaaatacacagatctgtacactcaaagaacgtgagtccagcccactcagtcatatgaacttagctggatataacacgttaacagacaggatagacatttttaccttgaacagaaagagctgtaattcaagttctgtgtcacagatacaatccgtacattatggtttctttaaataagccataaccaattttttttagtaattatttgcttccagttattcatgtgagattattaaaataagcttatgaagtaaatataagatgtttcaaatattcctatccattgagaaccccagaaattatccttattgaaatttttagaaaaaaattagataggtgcacaggaaaatccttataaaattatgtccctgacagagtttatatgtataataaaaatcaagagggtgggtgtttctaaatattcaactatatggattgaaggcattgtggtaaatccattacaaagattatactgtatatttgttgatgagaaaatatatattcttacagctataaaacaatgagcatcataaaattctatgattgcaatatatgacagtagatcatatatgtatagatgtatgtccatatatacgtgtgtgtgtgtgtgtgtgtgtatatatatatatatatatctgaacaaatatgaaggacacacaccaaaatataccaaaatattaataacaatgattatcttcacattttaggtaatttcagcttttctctttatggttgctgatatagccttaacatttataataaaaaaaaattcttttgtagttagacaaagaagaaatatgtgaagccaaaataggaaaacatgggggaaggaaggactttatatcatgtttcatctcatagcaaaactattggaagcatttcagaaacaaaagaccttaaaacttcaaactctaataagaaattgggaacaaaaatcttgagattgttatacaagagatgttaaagaccttaggcctcagtttctttcagaagcccagcaattgcaattattatttattatcactttacttttgcttgaatctctttagctaaaggtggtttacttccacttttccctaataatttatgtcttcatgataatagattttcttattatctttctgatttgtacctgtttcctatttaatgatttactctgtatggcatacatgccaaagttatcatgctagaaaaattattatgctataataattatgataccatcaaactgaattaaattatgtttcattgtaaatagtaaaatgtattaatttttttaaaagcttttttatgccagcggagataaataaagttacctttatgtactttcattaaacacaatgacagtacaagccaaactgataacaaatcaacgcactccttcttgtaacactcctaagttgttctgaaatcagctttcttaggactatgaattcaatgcaatgtattaaacagaatctgtgccttctgtgaataaaagtttcacctccatctcttgtgagtatatgtaggcagatctttgaacaatgaggttttcttccattgatttaaaatgaaaatgaacctggattttaaatgtgcattctaattgtccctttagcacatcagaacagcactgcctaatagaaatataatgtgagctacatatataattttgaattttctaaaatgcacattttaaaaaagtaaaatgaaacagttaaaactaatttagtagggcttggtgcggtggcttacacctgtgatcccagcattttgggaggctgagggtggcagaccacctgaagtcaggagtttgagaccagtctgggtgacatggcgaaaccctgtctctactaaaaatacaaaaattagccaggagtggtggtgcatgcctgtagtctctcagctactcaggaggctggggtgggagaatcacttgaacgtgagaggcggagtttgcagtgagccaagatcacaccactgcactccagtctgggcgacagagtgacttagtctcagttaaaaaaaaaaaaaaagtaatataccttatttaatacaatctatctaaaatatcattattttaacatgtaattaaaacctaaaagttaatgagataatacattattttttctaccaaatctatgtctgtattttacacttataggatatttcaatttagattttttatcagatatattcagtctgcatttagatgtcataagttttcagttgagaaagtagatccacataccaaattgtttcaaatgtatttaaaagttttccagtaactgaatcaatgatcaatttttaatttaaattcattaaaatcaaattagaaattcagctcctcagccatactacccacatttcaagtgctcaatagccatatgtggataggggctattgtattggacagcaaaggtttagaacacatgtataagatgttaacacagaggaaaagttaaaagttaaatcaatgccaaactattgggaatgttttgtctaccgggtttcaagaaataatgacatgactgatatttttcttattgaatcagctgctcggctggttggctcaactaatagagtcaaacagttgctgggttttataaacaaatcatctccttttttatttggtcctccaattttcttaaggcaaatatttgtgccaaattatgccaaagtctgtctctcctgaatatccctgttatcctcgaatattgttgagtgtcccatgaatataactgttaaatgctgttttgagttaaaaccaagaacacctatattgagaaaaaaattaaatgtagttaatgttgtaccaccatgttttgttctagcttctcaactgtctcatgtaaataagcacaataaacatctactgagtgattctgtaatagtttggatctataggtccatcatttgtgatgacacatagaagttggcccaggaaagctaaaagtatgtcatatgtcaaataatgccttccaccaagtttagagcagcatttcttccccagcattacaacttcatgtaatggcacttggcagtattggcatttctgatatgacttcttttggctagttcagaattcttaaaaaataaatagtttttcaccctgtgattgaaagggttaaatagtaccaattcattacactcacaaaaggatttattttgttctcataaatcagttttattccacatttttattattcccttgggtgagctactccaattgaaatcaatacaagtgcaagtgagacaatcaatctcgatatttgattatggattggagattcccaggtccgctttttagccagtttctttctgatcatctcccccaaagaactgaatatttttattgacatctatgagttctgaacatgtttagaaagaagataataatcttcatttgtatactgacaatggaagccccacaaatgaacaaggattaaaaaataaagacttaaaatatgtagctataacatcatcagcaaacttcaaatttctcaatatttttcttaagatgtagtcatgttttaaaataactttattctttcttttaaaaaaagacctgttaatacaactggtggctacaaaccacattcttagggtgctattaggtaaatgattatttttcatgacaaagatattatttattttcacatgcttgtttcagagctgaaccatatcaactggtctaggttaacaataagaaaacagttaaggtgaataaaatgcctttgaaggtatccagcctaggtcttttcatttctataattgtccaggctggaaagccaccatctgggggatttaaaagagaaaaacagctcaactttaaattagagagcaaaattgattaagttgttcctcaatgaggccaacatttatatatcaaactctctttgctttacaaacaaatttatatcttatgatcctttacatatcgaatgcttattttgggactcatggtaccatattattgttctcttgcctctgactctagccacctgttctaggttcttaagcaaaatttttgaaaaggcacaattaaacctttccgtaattcattatttgatacttagaataaggcaattatttgatgcacttatctaatcatattcttaaaataaatttcaaggtaatattaacactgcatttgttactttcagcaaacattttagccttatttagccatttactaattttcactagaatccattggaaggggatgtttcatgttttggacaaattacctaccactgattttttttcaggaagacatataactttgaatgttgtaaaaaagtattttagaaggagttaaaatagtaaacccatatttctttcatttaagcaacattaattactcttcagttactcttattaagcctttagaatagcagctgtataagccatataagccaggcacttggatttccactggcaaacttcctaggcatgtggaattaggggactgtctagaacttatttttgtccagcttcatttccttttcagtaatttgcatttattaatgctgaataatgaaagataatcaaaacattaatgaaggtatggtgcagtgatgtaacaaagggctatatcaacaaaatattctttccacgtgctttgttccactctttaaaaaaaatatttactcaagagaatcattctagaaactggaaattgctccctttattcaggaaggcagtatattttttaaaagttagcttctttaattgtttaattcagaggttggcaaatcttttctataaagggatagaaagtaaacactttagactttgcaggcaatatagtctctgccataattactcaattctgcagttatatcatgaaaattcctagaaagataattacttttgttctaataagcctttatttacaaaaataggcagctggccaaatttggcttgtagattgtagtttgtgggaccctgttttattataactcgtttatacattaaaatgcaatttacatactttccttggatatttcaatcttctcatgattcatttgattttgcaaaaattatgaatgctaatttaaaaatctatgtaatacagaaaaacaacatccactaaaatcccactacccataaataaccaatgttaacaaacagtaaacattattttagagctgtctcaattcatgggtgattcttggtagcaaacaacagaaacaaatttggttaattcaggcagagatgaattatattaaaggaattcaacagttcaaaaagttgtcaggaaagctggagagtcagacttgtggagaaccacaaataacatagcccagaccagcttatgccttcttaggacacccccactggcaccatcaccattcagtcgccttggaaaattatcactctacttctggattctcaacaattttagaggcatcttgaataatccttagttgactgtgagccattgtttcactggatcaagctttgtagtccccagatgaaagcaatgcaactgactggcagtcccatggtcttaccacatgaacttcaggtgtcctttcatttacaaaaaaagagaaaattaagttatgtttctaatcatttctttctacatacctattatcttctccctgattgttagagtttcttgatctttttacttatgcattaattatgattctctcaaggcttttcatcataccattgatttagattttagctctattctgttcctggctttttctaacttgtttattaaatacttactgcattttttaatttccagattgtttctctgtctctgcaatatcattttatcatattatagggaatatatatcattttttcccaaactacatggttattttgtctttttatgttacaatcctttctttagctgtatgtataatactcgatatattatttttttcttcaacttcatcttgcttatgccttgtatgggcagctctgtccagattttgcactggttctgagcttggtctacttcctttcctttctggtgctagtcagtcttctttcgacctaaattttgagcactaggtgttgctagagggtgcgaagatgcactgggcagaattctggggaatccagattttctgtctcctctgagatcctattatatagcttttgtggcagcacttgctgcatttattcacatgtatctcccacacctgggaacaccagctttttcccccaactcagcacagtgcttggcaggatggccagccctgatttctcttcctgtctctgcagactctactcagttcatttctctacatattggagaggattttttttggcttatactccttcctctgggaacaaagttaggagctgcgctatactaagaaggaatttaccatctctttcttcttttaggtttcaaaattcatgtcggtcatttttttccttttcctttatacatttgtacctggagaatcttcaactaaaattgttaatgttactgttttcatagtttgtttccattctgtcaggtattttggaaagacagttgtgtggtaccacttaatttagaagctgtgaaagttcacaatttgtccaaaatctctttctagcaaggtgattcatatatacagttcagagactaacagggagactgtaaggtggcatctgactttccccacctcctggtgttcatgtccttgtttactctccttcccttgggtgtcttcaaaacctgtgacttgctgctcaccagtagaacagaacaaaggtgatagcatgccacctccataagattgtaacctgtcttgctagaagactccctctttttgatacagcaagtggtcacactggggaggcccatatgggaagaaatgagggtgaacgccaggcaacacaaaactggtaactgagagcagccttgagtcaatagccagaaaaaattgagaccctcagtctcgacagcctacaacaaattgaaaactatcaacaaccacctgagcttgcgagagatccttcctcattggaaccttcagatgggatttcagtcctggccaacaccttgactgcagtcttttgagaccctgagcacaggacccagttagctgtgccagactcctgactcacagaaactatgagattctaaatgtatgttgctaagttcgtggtgataccatgacacatcgataggtaactaacacaggaacaccttactgtgtgactgtagcaaatgaaacaggtagaattcaacagcaaaacatgatatcattctcatccagacccccaagtcgttgctcttcttttacagaggaaccatctcaagtatatatcttccagtaattagaagaaaatgttaaacatgtcattaaacaaagaatggaccataggctttgtctgggatcaataatggttgtcaaattacttgtctgatcctagtagcaccacaggctcagcaggttcagcatggttagtaaggctctaccagaactttaaaaggaaacacgttttggtgataaaatagttgtattcatgtccagtgtttagtgtggaagccggagaccactttctatgagagtatatttgttcaataacttttagctgattgagataacagcatcagtttgttcagctggaaaaaagtttgcccaaatggcaaaaaaaataagtcaaagtggaaaaaaaccctgacatttcagagcatatatggttagtaaaaatagaccatacttctacaatttacaatagtcacagtacatctctgaatttactctctctctctttctgtgtgtttatatacatatatatagtgaactgtactgaattttatatatcgtagtgaactttatatataaaatgtataatatacatgcatatatacatatatctttcatttttataactatttttagagcagttttaggattacagcaatattaagcataaggtacagagatttttgtctatcctttatgcattatagttcctttctgatattcataaaatgagatacatttaggaaaatctgactgtggtacatagagagagcttgatggggaaaaataaaacatgcttcaacaaactttaaaaaataatttgcgatatttagaacagtaattgtgcctacacgttaaaaaagatctagagaacaaaacataaagattctcgatatctatagagttgtcattgctcttgtatgggcacaaccaggacaaatgtgtctgaagcatcttttggtgagttgataaaatagtgcatgtatttattccctgcactacaattgtcaggctagaggaatgaccaatttaaagaggagtcaaagaagtacagctttgactagatgacaactaattaaaatcactattacagtaattacagtaatgtaagaaatatgatgcattaatcgagcaccgtcctcagaaggtcttagtggttcataggctatttatttctctttcaaaatatcctgtggagaagacagcttcgtaggcatatgtccataaatattttatacattgtcaaaaacttaaggccaggaatagatttctttcaccatatattaattacaaaataaacaaatactcagcacctttcagattcctaccaacatgagatctatcagaaaaatggaatctggaagaaacacttgctttttggttaaaataatttaaaataatatttttagaaggaataaataaatgtaacttaaatattaatacagggtatatagagagacctgaaattcttggctcacagtaaaggctgattttgccagtttaccttgatcacaattcagtgtcttctgattttggtattggcagaatttcgtgatagtgagatggaactgaacaactctaaaattgagaccttaataccagaaaaatatagtatttctttgtacagcaagaagtgggaaaaattagttaataccttttctaccttaaggtgtaattggattcagaaaaagactaacttaaagcaggaccaggcctgacatataaaatcctcacgaggtaacaagaatcagtttggtttgttcactgtcatttctcattataatctttgtcatgagaatggattcatgttgtgccattttctgttcctgttacaatctttgtcacatgaataagatatcaggatgttaatgcctggcatacagtattgtgtgtgttatgatactgtacaggactacgctgacctttgcaatattatgtattctgattggttgttcatgtcacctctttcccacaagttaataaggctgtaaaaaggagagaactgaaatggccagccagtcaaattatagaatattgaaaaggtcagagcagtccagcacagagaaaaaaaaattatggaatatatggtgcattaaaattcttgtgacaatgattgtaacaagaataggaaaggatacccatttatgttattccaatctagagaaccccataggatggtattctcgagacagcaatcatttacgcatccctgagtcatacatgtgaaaatatccatttatgctgttttttccttaaaaataattgcatagattttctactattcaacaaaaaagagcattgaaaataagattttcatctcagaaaaggggcattaatattgttaacatttcagttaagactttatatttgagactaaagaaaaggtttttttataagtaaaacctgttgttcatatgagatttatttggtctattttttcatgtaacacttttctttgaaataaaataggagagtaggactgaatgaattaacctttttcaagaccctttagaatgtgggatagaccgaaagagcagttaggagtttatgtagaaattctacatgatctatgcaaaacttattttatctttatgatgtgtgatgttggccaatacacaaaaaatcttttcttcctctgcatcttcagtggaaagatagtgacagagagaaagaggtataatacttaaatcagaaaccctgatgttattgttcttaagtgtgcaataattacttatttttcaaattgtttttatgcatattttaaattttcttgtagaacaacttcattggattttgtagcctataaggagacatctgttttaaaccttagctttacacttatttcactaatagagtaaacatgttatagtccaaagctagtcaaagctagtgatcccagcaccctatgctctgatgctcatccagtaggcctggcgtagaattcagatatatgaatgtttatgaggtaaccccaagtgattttgatgtaggttgtgcctggaatattggtattggcaacctcattttgcaaagagctaagtgagacccccagttaaagcccaatggctcagaccaagccacagagggtggaggagggcaactcaacttcaaatcacagtgcttgggtgggggcgaagcaggcagtggggagttgcggttccagaactcagaagcttaaaaggtcttgcaccatccacttatactcacaaatagggtcagattggagggccaaccagacaggaatggtcgcctgcgataggacacacttatcactttcacattttcaagcttgatttttgaggctgaaccaacgaggctgcattttccagcccactgaaagcccagtttatgcagtgaaaagtggcaaagcacaaccatctcaacaagaggaacctgagcacaagcattttaaaaatctacccctccccgcccatattgaggagcccaaattcctaaagttcaaaggaagaaaggaaagacagtgagagtgaaatggaggaagagctaaaatctgtggatcctgctttggttttgaatctggaaatttttgagcttcattgagggctgaaatcctgtcagttactctaggtctgtgaattgaactgtatgtttgtaggggtgagagaacattagactcactcagctgtatagttactggagatgtacaagttcttttttgagctgagcaaaatggttatgtaattgcatacttctcataattattgagtaattatatacttcttataattactgagtaatcattgttctataactagaacttaatgttacaactaattatataattaccatgtattaatgttgttatctaggaagcttagaatgaagtgctacttatatatctccccctgccatgccattttcaaagcaagcagtagtgtttgttttttgtttgttttacagttcaaaatttccttaaaaaacaaacaaacaagcaaaatgcaatggaaaaaacttcaccaatattatactcatacatatttactcattgattttgtatttgtccctggctgaaaatttgtaaaattatattctcatggcttaattttagaatttccattgttgctttacaaatttcaatcttttataagacctgcacagttacgctacttgagagtcaattgaatatctgcttgagtctataggacaagctgacctttttgaaagtttacaattgagcatgtaatgacagcagaaatacttccaaggagctcaatatcatggggacaggaggagatctccccatgctgaccatgtaattgttcttaggcaatggttaggatggtcatatttaatcttaaccaggtttcttgagtgcaagaattatgtcttatgtacttggggcatgttctcgtcagtgcctagaaaagccttctccttgcatgcagttggagctcaataatcttcagtagaagcaagctgactagttgtaaagaacctaggaaagctaaaatggcataaattggaaatgtctttttagtgcataatgaaattatcaaaggctgctttgtaggtttcataatgtcttgctaataagtattacacatatagaggagtgcattatctacttacattttaggaccttgaaatcattctttaagctatgaatatgtctttatctgcctttactgaaagtgaatagaaattatcattgtcacgttttagcccacaagcactgtttatttcctttgaagtaaactacttatttggatgtgccaattttgggtccagagtaataaattatattatgccattagggctttcttctgctcatgaaaaaaactcctgagtattttgtaacagtagatttttcagtgacttcctccatccctaaatggttataagtatctttttaaataactttttgtatgtttttacaatttgttggacctacccatatttcatgaaaatagtcaagtaataaccagatatcagaccctcttttgcattatttgatcttcattaatttcagtttgaaatataatctgatgggacaatgacacattggtaatggatgagattagtgctgctttattcattgaaaaaccttagaattttgatgaataatacattgttaggttggaaggggtagagaataggtaggtaattgctactgagaaaatgaaatacagagtacaaaattcttaatcacttgctagttctgaatggctagaatgtatcagttgtatggattacaacaaaaacaataacatcattcctagctgttgtttatgagcaactattatgtgctggatatgataaagaaataatctcacttaattttcacaatagcactgcaatgtaaatactgtattatcattcccagttcacagatgaagaaccagacattcagaaatattaagtaaattagcaaagagcacattgctaaagaatacaagaacaagttcaaatgcaggacttttgacaaccaaatttatgttctttcctttgcactatactttgctactaaactgtgttaaaatataatgtttttgtaaatattgtaaaccttgcattttgtatactatacgatgcaagatcacttttagtatgatgccatcttttactttttaagcatttgttcaataaagattatatcagtatctggagatcttgccagtatgcttgttcttctctttgaagctcaatatcatgtgttttttaattcatttgtctatatctgcagaatttgtgtgtgaaagattgaatgtacatataataaaaagtggttttatataggaaaaaggttatttgaagtaaatattggtgctcttttagataaaaaaatctcactctgtgacccaagctggagtgcagtgacacaattatagttcactgtaatctcaaatttgtgggttcaagtgattctcccacctcagcctcctgagtagctagaactacaggctcataccaccatgaccagataatttttaattttaattttttgtttttagagatgaggacttgctatgttgcctagcctgggtggtactcttaatcattcatttttctgttttttaagagttattgtatcatttctaaaagtgacaaacattaagcagcatttaaaaaattgtctcataaatttttcaggaaagcatctaatatagaaaatgttacaattttcatctgtagcccttttcttattttaaccctaattttttactcttaacctgaaatttaacctaatggtgtaagagagagagataaaacactgttactaggcagaagtattttcctgcattttggactgatgagatttaagaatgggtttgctaaagctttggaaggacagtggtgttgggaccagggtgaggatgtattaaaagtgattcttttatatagctaggcagcttctgcattttctcataaagctaaaaatattagatcttctgatcaaagtggacatatagtacctcccatccccagttgcttttcaagatattctgactaattgaaatttaaaagggcattagatagaaagaaatccacccacatttcaagcaaagtgaacagaaaacacctcagtttgtgaaatatacaatatctgacaaatatgtctgagtataatacgtatatccagaacaattctatttgaggaataatgtgttatttcttcctgtctgcacatccaaaaaaattcagggatttttattggaaaaaaaaccctcaaaaaagtataaacaactcatcaagtaatcaatttctacatttgtgcaatacttttacttatatgcttgatacttgtgatatggctttatcctacagttatctaagaatattcatcaaattatttcgattgccgtgatgaatgaattggccaggtcaactcagatagcacttttgttcacaagataataaaatccaaatatgtgcattgatagaagcacatgtaatgcctcttagagtggtaaagttacagacctatttggtacagtatatttagaaactcaagaaaatactcaaataatagcaggaatgaattcttaaatatgtatttattttaataattttcttttttaatcagtaggtaataactacacccttctgaatgtcacaaaagtcatgtacagcggagaagagacaaacctttgggtgctcatcgatgggctggttccttttaccaactatactgtacaagtgaatatttcaaatagccaaggcagcttgataactgatcctataacaattgcaatgcctccaggaggtaagtctatgcaaatgttggctatctaattttatataaatgccctagaattaagtttccattgaataccttgtttatttttagaggtattttattttagaacttagaggctcaattgtatttctggttcttttaatagttgttgttttgctttgtttattcagattctttaattgacgatcttttattgttttgttgagactgctttcatccacctcacactgtgtgtatgtgtgtgtatataccatacacacatacacacacacacatatatatatctggatttctgcatgttaagaaaattgggaaatgattttgttcaaggcgttacttaaagccaaaatttatatttgcaatttgagcttccattttctactgcaaatggttctcattcctggtgttctaaataactagttcaattgtatacttaaagtacttcatttggcaaaaagggcagggtgcagatgatagaataggaaaattccatttgcactactggaaaacacctttaaattcctgatcctaataattacagttcagcagggccacattcatgtgtgaaatgtgatacagtctgcatatttttattttaaatatttctataaaaatcgacctattcacaattaccattattttgatgtgccttcagcttcaccatgttttaactcgttgcgggaaataatcgcattgaggaaaacccctctagggttgacatggatggcccttgaacagaaagcatgcctcaaaatgttaagagcatgactctcaattgagtgctaaagaatgtgtgttttctgaaaatcctgaaggcaaaggaccccaggacatccagcatctgccctgtagcccatctcccaggaatgagtatattctgaactaagggagaatgtcacaatcttttatcagcaatccgaagggcaggttaaccccacttccagttatgaagagtataagaacacaaagtgctttatcactggagaaaaataaaagggaatcttcagtttgtatggaaccgctcccctgcaaaaaagattcattacttgttgtatcataaaaccacacactattatctaccttttatgccattattaaaattaatgaattgatgtttactaaaatacttgaaactgtaaatgtcagaagctacattacttaagaaaagaatgcataaaagaaacttttgaggctgatcaactcaggttagtatcatatttattgagacaataattttaaaagggaattgaatttagatatatttatttaaaaattgagactgaaacccaaaataaaacaaactccccccgctaaaataaaccttaggtattcatatcttcatttttcacttcaatacacatgctaggaaggatagaaaactgtgatggctctaaaccttagaatataatatcctttactcaaatttagaaattaaagagtaatcagtgccataatggaggttttaagttatatagtaataccttttctacaggatatatacaatatttaataagcgtgtttattttagggtatttatactgattaaatagtttgtgatttacagtaatttatatcatattcataaaatagggcaaatttaattcattgtttatgtttttaggaatgtatggtctaataatttgttatttatacatatatcaagattcaattaaaaatagcaaggtcctactgctaacggaatatgcgctatgtgaatatacctgtcagtaaaagggttaatattatacaaatagaaagaaactaaaatattgttttatagtggtgcagtcaaactgagtaaaccattaactgaggcttatcttcatctttgctctgtggatgcttatctgtgtcattaccataatgcactgcaggcccacactctctgggcctgatgcaatcctccactttatgtattcagaaatctagaatttgggagtcagtccttcaccaaagaggaagcaaatgtcttcaaagacagacagtgattcgctaaagtttattatggccattaggacatactttcttttttcattagattgttgttgattacaattaggaaacgtatagctttaaaattatcttttttatgaccttgtggcagtttaaaggtgatacctcattgattaaataggttttagttcatgcttccttttacttaatgatctgaaaacatattatcctgatttacacataaaaatcatgctgaaaagcatgtggcattcactagaatatgtgtgtttaagtagaattaaattagtactgagagttattaaagaaatcttccatgcctttgtccagtgaactgtgtttcattctgaaatgaataataaatggaccaatatacggaggcaaaccaacttatgggcagagaaggttctatatgctatttacttttccattatagttggattgttatcattattgccatttccttgatttcaatattagatctctcttatggtgatgttgaattcctagtatctttcaatgctgggtgatgcaagatttgtgatgataatatccttagctatgcttcttttgcatacttttaaaacataataagaaaagagttgggcaaaataaaatgctcttttttacttcatcaaatatttgctatcaaatatgacctggaaaatcccctttacccgtttaatctggccaaatcctactcattttttagcctcaaacctagaaattggtctatcagaaagtcatgttttgccaacagaggctgagatagggcctttctgtatcccagagaacagttacattatactgaaattgcctgtttaatctgtcacaatcactggttataagatcctatagagtaggaactgtttcttactcacatttctatcttcagcacctagactaaacctgacacatggtaggtgcataatgaataattggtgaatgaataaattagtcaagattgcttaacgacttgttttaaattttaagcttattattactcaggccctccaggcctcatctcaacctcagcaaccttgtattttagccagctgtgaaagagaccttctctgtacaccactgtccaatgtaggaatgctctggttatgtagataaaattgggagctcaaactgtaaggagggtgagtgtattggaggtgagaaatattctcaagttatgccaactcttcattcttttattcttccctatagtggttacttttctcaggtgagcatagaataaacaatccttagtttagatagtaatttggaaaggagaggtgaaagggtcatactccaaagaattttaccaggatacatcatctcttaatttgtagtcaggacacatcttatttgccagtcctacctctatttttctgatgagaaaaaatatataattaagaatatgataaacacaagttatttgaagatagaaattaaagtaagaagatggtgctactaataacttggcacatagatgaacagtggcaaatcccaattaacacacattttttatttgaaaaattcactttaaatattatttggacaactggaggggcgtctctgttttttccaattatgtagcagatccttccctacttctgcacactcaagttttttgtatttctacaattactatatttttaggttgtttgtaataacataatgctcatatttagcactaaggtattcttggaaataaaggatatatttaatcagagctcttgaatagtattatggtacaggttcaagagttctaggaaaagaattaaaaaaataaaaacgaatccaaatgttaatccataaatatgaaactttcctatggcctttaccccttcaaggtctggagttactaatggggttaggatttcaacgcttaatggggctcagtgcattagtgttttgtatgcatggaattcagcattcagtttaataagtggttgacattggtgatgtcccttaatttgcttaaatctaattggctcttttatcagtcaaacctgtatggattggcaattgatcagaaagggtcagccatgactctgcatgtagttaaatgatggaagcaccagttaaagtcacagttgcatgataataagcaaaagaagaacaaatgagcttagaggaggaaggcaaagaagcttagaagttttgcaggatcttcaagttcagaacaaaggcattatagagtatataaattttaaatacactgcattttgcctccagacttaaacctttttttttccagatgaactgaaatcttgtctgaaactgtctttgttacatcaaagaactactcagaaagctaaaagagacagaagaagcataaaagggcatagtttaaaatgattagtgacaaattccatactgacgagctagaaacagatttttaatgaaagttttatattattccaaaaggaataattctgtttatctttttctgaactgctttattgtaacagtgaaaggaacttggagccaccctggtttgtgaacctaatccaattttcctctgagagtaaataatttgtcatttgtacttttaagttgatgagaattattataatctacaaacagtgtaaaatactaggcttgagaaaatctgtttatttgcccaaatgtgttattagagaaccaaaaattgaaaaaggcaaaatggttgcgagtagtttgttttacagggtcttttcgactctctctccttcccctgaaccccctctccacttatccacctaaaatatcaatgagaaaaaaaagaaagaaagaaaaccattaggaagtaaaacttaggcacatcgcaaaagcatagacgttggagtcctagaaacaaggatttaaatccacctctttcactcactgcttgagtgactatgagcaaatctgcagatataactgagcttcagtttgctcatccattaaagaggctggatggtaattcccacctgactggaggattgaacaacatattatatgtaatgtgtttagcgcattgcctgtcttggtaaacatttggtgcttcctacctcttttgttctattttcctactaagactctttttggggacctggaaaatgccctatagaaaaagtaagtaaaaaaacctgtctttcacatagactgcagagaccagaataatttcatcttgctacatccctatcctttcctacacttaccccttaacatgttgacatacatatggccaggccagtaaccctgctaaggggtggttgtgatgcatattagatgatgaagtaagcaggaagcatgggaagtgattttctttttgaaataccttcagcatcctcctccatgacctccagatcataatttgcgaagatttttacatcaagctctcattggtcatcttgggatttcacatattttcttaatagaactcttcttctgtgtttatatagagctacttattaaatataattatgactttttaaaaaatgtctattattgtatattttattcacaaatgcttttttttacattgttaatgctagcccaaagcaagtaatttgaaattttatcctaagatgttttcatgttttcttaattgtcctcaaatacatatatttaaaagttacatcttggaattcaaactttttttcatttttcactaaataggaaagtttactagttgttcagccaatatgcttttgaataactaaataaaatgtttgcttttaaaagatgttagtatatgatttttgcccaataataccactaaaggaataatatattaatgactaacttttttagcttgaactactgaattccattctgtttagaatttaagagactggaatattctttcgggtattgctgtgtaacgagtcactccaaaagtcagcaacttaaaacaaccattctgtattatttctcacctgattgtgtgagttgtcagcatggttctcctggcttaaggaggctggactgggcttcttcagaattcccagaaagaaactcagggtttcaagagtcaagccctagtgtacaagccctgaaaacctttgcttgcctcaaactgtccaaagcaaatttcttgcccaagtcaaaaagcatgtatgctggaatgtatgatttactggagcctgataatttgtcaatcttccataaatgtctaagtgattggtttttagattgtgtatgtgtatatgtacaaacacatacatgcaagtattacagatacataatttttcttttaaattagttctgcttttgaaataatgatgtactagcaccaaaaaaaatgaagaaagcagtttactaaatttttccttgaagaagatataaaaaaaaatctttccttacatgacaattaattttgatgttttatttcagtataaagatcaataaatgtatatcaatagattcttgtttaaaatgtttgtagctccctattggagggaaaattctgatctcttcttataagtaggtgatttaaaaaaaaatcttagctatttctcaaatctaggccttgggtattctgatttctgcttgtaactttgaactgtgagagtagaaactgtgtgtaatttgaatattttctgtagctccagtgtctggcataaactatttgctgaataaattaccagagccctttgtggcagtgataacttggaaaataatcctgaaagttatattttgctattgctgtgtcttttacttggataaacattttccagaattaaattcaacatttagggtttaattcatcctaaaattatttttagtcctgttaagattaccataacagtgtaaaaatacataatataggaccctctggaggtatgtttataaatttgtgtgtgtgtttaattgtctattttacctaccattttattttttatttttaaataattccatcttttatattatgtttaggggtacatgtgcaggcttgtcacatggatatattgtatgatgctaaggtttcaggtatgattgatcctattgcccaggtagtgagcagagcacctaatagttttcagttctttgctttctcccactgttccccttctagtagtttccactgtaaccaccattttcaattaacttatctattgtgattggtggttgaacacttaactgaaaataatgattaaaacagaacatccaaaaatttaaatatatattaaacacaactttaatttagaacacataaatatatttatctatatatttatccaacaatcttgttatatagggccaagttgttttcttggagtgttaatttagtatttataagtccagcatatttgctgccaaaactatattcataatgcatagtttgatttccactttgaaaactcctttaaaaggagaacaaaaatttagagataattaaggaagaatctaattatagaatttttcaggcttttgtaatatcctaagtcttttagttatttttcctgaacgaatttcacagtattgttttattaagtcctcactgaaagtttttcaaagcagtaaattttcatagaaaacggtttctgttaacagtgctcatcagtttaagcattatttaattaaatgacataatcataatgacaaccacaattgacatcacaggtttaaaaaatacagctgactctttgtgagtgtataattctacctgcgactgcagaatgttgcccttgaactacagagtagtcaactatccatctctgcaatacagagtaaatgtaaattttttattaatctggcaagtcagataagaataggtaggtaaggctgggcgcggtggctcacgcctgtaatcccagcacttcggaaggccaaggagggtggatcacctgaggttgggagttcgagaccagcctgaccaacatagagaaaccccatcgctaccaaaaatacaaaaacttagccgggcatgttgtaattccagctattcgggaggctggggtaggagaatcgcttgaacccgaaaggcggaggttacagagagccaagattgtaccattgcactccagcctgggcaacaagagcaaaactctgtctcaaaaaaaaaaaaaaaaaaaagataggtaggtaaagcaagtgtctactatttaggaaaaagacacgcttccaaagtggcagaatgatccaccctcagagcagcctacccaagtaggagaggcaggacaatgctaccaaattcttctcttaggttaagcattaccacagctctgccttaaaagaaaaaagaaattattgattatatcccttcaattgattagggactgagtctgagatttgtggcataacttgctcagtgaacttatttttctccttcagtttttaaaggaaagaactgagctttctcttctattttcaaatttcaaccaaaatctctttctaagaccttagagcaatgaaatgtgtgggtagcactatcaaccagccaggtggagaatggtatttttttttttttttttttttttgcagggtctctaagagaattaggggcaactagaactggctcaaaaagcaagaatatacgaaagagcaaaagagtaaataaataagaattgcaaaaacaaactctattgtatcttgcactttcttcatgcattgtagcactgagaattgtaaaatatttctataccttttgtttgtttttgttcttgtttttttgagacggagtctcgctctgtcacccaggctggagtgcagtggcgcaatctcagctcactctatgccttttaaaatcaacttagtacaatgtcaagatgctactttttaaaaataaaactaatggttctcaaaaatgtgaaagcttgcttgccgagtacagatataaagctcctcaatatgtgttttccatttttcatctgctctgtatccacttagatttatttgaaatatataaatagaaacattaatgtgcaggtggcaatgggatatcttaaaaattgaaagagtacaaagggatggagattttaaaaataaacgtaggttagcagctgaaataagcaataggctaagatggtatattcccttattcagagggtagaaggaaagatgagattaactgctttttataatgtaaaagccacaatgaagatacaggatggtgaggaatagcattctttaaaacgacaacattctaccacataaacagatggtttgtctttaccttcagtatattaaaagctacacaatttatattacatccagttcatatgaatctttcgaatagttgtgcataatgttttacttctgtgtatatcttccaaatgtgctgctattttttccctggaaaaatcaacccattgaaagtaataaagtaggagaattcaacaaataaaaagtatttaaattcttaataaaataaatagtgtgctttcaaaaacacataccaggccatttaatttaacccatgctttctcccaggtacgagaatagaaccaaaggatttatgactgtcttaaacatgctctcaaatcctttcctgaaaagtgttacctttacttttttggaattgatagtttaacctgctttgtgtgtgtgtgtgcatgtatgaagaggtatatgtttgtaatattacatatcataagccaaagagagggataaattcctgtttcataatttgtgaacaattttttcactttttgtattcaccatcttgacaatgaacttcctgcttataaaaacaccttagaaaaagactaacttctgagctatggagaagagggaaggaaactttgaagtgtgcttactatggactcaacaagcctccagcaaagggctgccagctctccatatttgcatactctcatgtggattatatagaaatacacacgcccacacacacaattaagtgctatctttaaagcatcctggggcaagagagagagacttaaaaaaataaaataaaatcacatctttttcttttttaccaggggagaggggtgggaaatattgttcctttaagttccattgatattttctaactcacatttttaaaaagaataagtacaattcattttctttttttttcttcgaagacggctttatccataactttaagcttaaaaaaaaaaatcatgtctgtctgactgacactgcagtctaaaagcaacttgaagttttatttgaatttttatagtgccctaaagaaatttttgctttatttctttaaaataatatcttgttcctcattttttcatagacaaactgtatgcctgacttgcataaaattctatgaacatttacctgcctatataaatactcacaaaagtgagaaaattcttaatatgtcttagatacttagagaccatatttccaacctcttttcatcagcagcatcaagaaaatccctttttctatctctataaaggcatatagaccccccagagtctaaaagaaaacttaaaaacttaaggaagaatagattttgacaacagtagggaaattcacttacaaccactatgcttttcatgattgttaattaattgggacaaatgaaactagaaacatgagggtatctaatatatactttattagattaatccctcttacactttgatgaccattttcaaatgtatactatctttcatttttatttaaatgtttcgtatgcttgtatcatgtcttatctactagatggggaagataaaacgaatgggctgggtgtggtgtctcacacttgtaatcccagcactttgggaggctgaagtgggaggattgttgagctcaggagtttgagaccagtctgggcaacatagtgagaccccatctctatttaaattttaaaaagaagaagtaaaatgaaaaaaaaaatgagtgggtgaatggaggtagacagaggagtcacagctggtctccctttttctttctctatccctctcaccatttaccttggctcaggcatataataggatattagtaatgattactatcatgctcttgtgcagtcctagtggcctggggctatttttgcacccagcataccttcaccctttcttttgatgacagggctccaatttccctctcagcaccctgggctctttcaagatcagaacatgcacatgcgctgtgtgtgaagttgactgcatcaccaggtctgaccaatgaggacactgtattctcctaaccacagtgattttttttcaggaatgacaggcattccaatcaaagccactgaattgcagtaaaccagtacagtaaacagaggcatgtctcttgccctgtatttgaatatgggattcggctcaatttgctgccagccatgttgcccctcaaagagtctgagaaatttagtcagcaaggaagaaagcagagtgggtatgagagaaggaggtagactagattctggtgacgtcatttgatcctttgaatccagcattgccaaaacccagctctttcccttgagtgtttttttgtttgtttgtttgtttgttgattacaggaacccactacccatctcattgcttaagcctctatgtgttgtgttttctgccacttgaaaacaaaagcatttgccacaatgcttgagagaaaggaaaacaagtagagagcatttagagaagtctcatcacttcctgaaaatcatgccaaatgctaaacttaacatatgtgtttggcttttgcttgggctctcaaattaggaaacctcaagaagtaagctggatgtcacatgagataatattttctaaaactgtgaaatggctcatcccattctgaagggtctcctcagagccacttcatttgacaatcttctgagctgtttctccactattttcaggtctcagagccctgagttctagtaataactcttgtgctaattagctgtttggtctgacttaagtaactttacctgactatgatgttggtctcttatctctaaaatggcagatgtgaattagatcagcagtatctatagtgtgatcccagaccaggaacttcaacattccttgaaatttgcttgaaatgcaacttctcaaaccctactctcaacctacttaaccagaaattctgagggtggggccaagcaatctgtgttttaatgagattccattaccaactcccaggtcactgggtgccttcacaagtttgaagaccactgagctagaccatctttaaaatactttcaaagaaaaaatatatgatcttgtctatgactttattccatattcatatttgagacaaatactcagggaaaaataggtataataggcctccatgctcaactggtctttgaatatataagtcacattcgtagggccagaggtctttccaatgtaagaaagccatcgtgttgctcacagtcttcctgaatgggccaggaacagataccaaagataaccaattccagatgttgagttctacctgtggcaccagaaagcaacaggcatgatgttttatgcactggggaacactaatcagccctactgtgaagacactgtcagctaaatttcctttgctcttcaacttcttcacagaacatctgctataagaaactccttgtaactaaaacctgagtctttcccctctggggaattttctttaatgagcctcttgtggctacatctgtacagttttgaaatatgtttcctcaagtcagttacatcttcatcctggattctagggtttgctgtctattggacctcatagctaagatttttccttctaggagttcacaaacacaactccagagtaggttgacatagtgcccagtatctagagaaaaattaagatcatgtaaccttttatttgctaaaaagagatttttgatgttgtgatcactcataccaagatagcatttattaatactaggtgcaggtgtggttttgcatatattaactcattttattctcctcacaaaccctgtaaggcaagtgctattattatccctatttacacataaggaagttgaagaaacaatattggcttgcaactagtaaaggtcatcttactagtaaaaggcagacactgtatttaaacctagagactgactatagaagcctagttctgagccactatactctattgttctactgactgtagaactatactctatttcttctactgactgttcatatgctctcttggcagcagcaacacagattttgatgccccactaatcaatgcagatctgaagaggtgacttgactctatagtagggtcaaatataattttaagggtattgttggttgaactagtaggtttttaaatcctgttgcagatggcctagagaactgtcctcagtgactgtataacccatgctctaaagtttataatgtcataagagaaaaaaaatgtaggtaaaacatgtttacagccttacaaaaaagcattaagcagaagcaatattatgtggtacgtaccctgtgtggagaaggcaaagaaaccaaccagttggactcatcctttgccagtgtggatataagtacttaacttgcccaccaagtattttgcccaacttctgtcatatttacctatgaacttctattataaattattataaattgtgatcttctgattgtacatagtttgcattcttgtgaagagacttaatttatctaatagtgttaattttgaaaaattaacaaactttcttaaaagagagcaagaaaacttatatttgtaaaaactaatgaaagaaagaatctttttcttcctgtactaaaacaattttctgtgaacagttgaaaaaacactctagtcaggtgaagacacttattcatatgtggaatattctagaaataagccatgtgaacagtatgagtatgtgggaaaattgttcactggaatggccacaaaatgaccatgcgtgacctctgggccataagaaagcaggaatactttcctcatcaaaatctgaagttgagggcatgatcacaggaaaaagcttaaatcttattcccatggttgatgctataaatcaagtaagcgtgtatcttagactgtgcatttgtaaagcacagtgtctatcaaaatatcacaattcaacttatccaccacttgctatccccagcattttcatttcctgattgtgtgaccttgagaaacttttctcctctctaagcctcattttgctcatctgggaaggggtttcataattacagaactttcctcaatgggtttagacaaggaataaagaatgtgtgtgcactgagattagctggcacattaggtagctgctcaattctttgtttaaaggacataaagcatgatatataaatacaaaatatatgtaagcttatcactattcagttgaaaattaacctgtaaacatctacatttttatcttctttgatgattccaacagctgtctctaaaactaagtgtaaggaaacagcagactggttgtggcatattaaattataagtgaggactaatttgaggatcaaagatgctctttgggagatatcgcctgactagtaggaaaagcattagctgtctccctctgtctcatgtatttgttctctctgtcttggaaatatccttccccacagtttctgaatcttgatgtttaattgaacacaaaggtctttgagaaacacaacagggggttgttcctggtagttctagcattgaggaaattgaaatgtacattttttttctcatttatcaaagaagggcaagaatctaaactgacattttatatcaaatgaattatgaactgtgtactttgtacctaagggaacaacaactaaattagagttttagttaagagagagagagagacaaaaataggctttgaataaaacatacagtaatttctgctactgtgcctgacagtgacatggccagatacagttctattgtagaactagtgactggatgcaggctactctgaaatctttaaatgtatttgagagaccgtctcagaaaaaattaaacctaaatttcttatgttgttagactttatggtcagtgaaatagtcttgataatctaaagttaactttcagctttttatcaatgcttactttcttaaaaaaaataatagttgcaaagttttacttcttgagaaagtatgaaattataggttgcttgagagggaaaatacaatgcagaataaaaataatatatatgaaaatgccacattccatctctcctctgattatctgtaacacctacacaaatactacacactacactcatatgttattgtgctcataaagagtgtgaatcctaagatcagtgggacttggttcaaatcttaatttcccccctcctactagctgtaagagcttcggcaagttatacaatcagagtctgctttactttgttcttctgtaaatggtagtaaataataagcactatctcacaggattgacactgagaacttaattatgatgatgcctgcaatagatacaacgtgatgcagtacacatagtagttgttacgttgcacagttgtttccttccctatgtgagaagattaggcagcagcaaattagaactccattatttaatggctgctgattcctgaagtataggaagtattagaattaaaattttaaggagaaggaccctataatgtctgtgcaatatatctaataatcattttttaaataaccaattgaaaattcttgggaattgggggtgattcatgctttcttcttctggacaaagctatgtattgattaccatatttttcttcacaaataagtattccaatttatgcaatataaaaataaaagaagcgttattaatatgaatacatttgttttagacttctaaatccccctaggttcataaacctaaaagtgacaaaattccttgatattaatcccatatgctttctgatgccaatgctatactggataataattttgtgactaaattactagaaacaaataactatcactgatagcctgattacaaattttcttcatataattattgatcattgctgtggtaaaatgaatatcataatttttattctcaaatgttgattctaactctactacttataaggtgaaatcagttcttagaagtctttcagcagtttaaattctgccaatgactattgttttattcttactaatagataatgtgaaattaatggcatgttgaggtaagggatgctgtcttgtccgtttaggcggctacaacaaaatactatagactaggtgccttacaagcaacagaaaagtatttcacacagttctggaggctgggaagtccaggatcaaggtgctgacagattcagtgtctagtgaaggctcttcttcatagacagtcattttctttactctaacttcacatggcagaaggggtgagaagtctcccttgggtctctattacaagggcactaaccgcattcatgagggctacaatatcataacctgatcacctcccaaggctccatctcctaatattatctccttggcggtgagaatttcaacgtaagaattataggagggacatagaccatagcagacaccccacatttaagtattttaatgctagatctagttagtatttgagtaatttaattaataaacttgaatattatatccaatcccgttgttacaatgacttttataaccaatctgctctgattcttcaatcattaaatgactaaatttttctccactattcaaagatcacttaatttcttggtatttgattgtatcttagaatagtggattcaatggcaccatagaggaagagtccaactctaaaatataatggtttattttctacacgacctcagtcattttttgttttgtttttgagaaaggctctcactttgacaccctggctagagtgtagtggcacagtcacagctcactgcagcctcaatctcctgggctcaagcaattgtcccacctcagcatcctgagtagctggcaatacaggcatgcaccaccacatccagctaattttgtattttttttttttttttttttttttttgtagtgatagggtttcactatgttactcagactcgtctcaaactcccgggctcaagcaatctgcccatctcagcctcccaaaatactgggattataggtgtgagccactgtacccagcccctcagtaatttattttgctatttttcttgttggatacattcaacaagggataatttaatgcagtcttcctgaaaagagtggctttgacttgagcttgaatttatttattgttaaccttgctaagcatatcaatttttaatttcacaaagactaaattcttcagtgaattattttaaatgaagtcaatgagcaatattagaatcaaaaataaaatagaattaattgaacagtattgttgtatatattttaaattatttttccaattgaagatatgctttaaacaaagggctcaagcaatcaggtactcaaggaaaaagaatttaatctatgctgcctagaaactaattggatgaatatgatcgtattcaaaataataggaatgctaagaaatgctcttaggaatactaagacgaattcaaatgtcgaaagcaaaggcttaactagagtgtctaaatgtaggaagtctctgtaaggaaaaggaaaaaaatttggttggtggtttgagacataacaaaaaaaaattcttctgggcattatgaccaccaacttcagggcctctaattagtctgacaaagtgacagttctacattctagttgaacaaataatgtatctaatgaaattcaaaatcgctatttttctctgagcacagtgagctgcatcattcacagctttggggtatttcaaaattaacagaggatgacttcagtctgtctgatgtttcttggttaacaaattcactgaaattgtcttgcagagcaattttaagcaattctttaatcttaaaccacaaagagaggtggaggtggaggtgtattaccttggtcctatggatgctaatgtgaagtggaatcttttatttctcaaaatggtcaacagcaattagtattcagtggtgtctttttattctggtgcccttgacccacctctgcccccctttctatattactcctattatatactgtaactggggatattcttgcttcttttccattctaattaaagcattcttagtgaacatgggaaccatttttcatttcatgaagaataattactggacctaggtgaaatctgcccattgggttttatataatttttgacaaatatttgcacgaattttgactgatctattcttaccatttctccgtgaaatgttggagaagttttcagttccctcagaacaataaacctaaatatgtacgtgaaagaccaagataaatgttgtaccaccttcaggttgtatttgctaatgtactttaaaatattttattttgtcactaatataagaaataatgatgactttttaacaatttttttttttatttttgcacatgtttctttcctagtcagagtttgacctaaatactcttctactacactagtgacaaccttgagaaatatcatttatttaggttggatctgtaaaacctatagctcttgttatacatcttgtttcttttttttattttattattattatactttaagtttcagggtacatgtgcacaatgtgcaggtttgttacacatgtatacatgtgccatgctggtgtgctatacccattaactcgtcatttagcattaggtagatctcctaaagctatccctcccccctccccccaccccacaacagtccccagagtgtgatgttccccttcatgtgtccatgtgttctcattgttcagttcccacctatgagtgagaatatgcggtgtttggttttttgttgttgtgatagtttattgagaatgatgatttccaatttcatccatgtccctacaaaggacatgaactcatccttttttatggctgcatagtattccatggtgtatatgtgccacattttcttaatccagtctatcattgttggacatttgggttggttccaagtctttgctattgtgaatagtgccgcaataaacatatgtgtgcatgtgtctttatagcagcatgatttatagtcctttgggtatatacccagtaatgggatggctgggtcaaatagtatttctagttctagatccctgaggaatcaccacactgacttccacaatgtttgaactcttgtttctttatttttctctagagtcctttctcagagccaagggtgtcttgacaagtaaaagagaaaaaagttactaaacagagagaaagagagagtaacagactaagaaagacagagacaatttcttcaaacctctactccaaaaaatcctcctcaaaatttaaacgacacatttgtttaaaacctcaaaattcttgcattctttcaaaacactgagctgttagattctaccaacagtatccgctctccaagttagttctttaggttcctgtgtgttggatggggaagaggtagggaaaggaggctagctaccttttatgtctgtgaggaagggcaaaggtctggtttggctaattttaaacaacattgtttaaaataacaggaacttgaactttggagacagttgctagattcaaacagcagcacaaacccctcattacttgtgtggtcttgtgcaagtcatttatgttatgaagcttcagattccttgacccacctacttcacacctaggactattaggaggattcagtgtgatgatacatacaaagcatttagtccattgcctggtgtacaataactgcccagcattaactctgacattgtagtgtgcttatgtttacaaatgaatatcaagatgttagcattgttcaaggggcaattaaccaaagtcattcattaaagttgttgagttgtttaataaacaactcaattaacataaagactctttaccaaaactttgaactttgttcaaatttcattcatccaaaagcagttgctgagctctttctagccaccaggcataactctaggtcctgtgcaaaacaggcttttggagcagatggcgtgcattccctgatggaactgaaggccctggccaccattgtggtgaagttcataactgcacttactgcatgttctggctggctacttaagaattccctaaggagatattggatagatcaaggtacttagagcttggtttcaccttctagggggagaaagggttgctcttaacaaaaactaggacaataaatttaaatgtgtttataaataatgatgtaagacaactatgtcaatgttgttaaagttggctgttacttttaagtacaaaattgcatattccttatttggtgggattactgtacatagttatttttagaaatcagaaaagttaattgatttactgtgattctctcgttttacaaaaatgcaaattgttttattatataagaagagtccattttagaccaaattcattcccataaaatgaaaacttcttggaaaaacaacaaaaaagaactttttaagaaaatgtattgattggtaactcatgacatttcttttctgttttgctttttggctcctgtgaatctcagaaaaaaaaagtctgttgctactcaggaggctgaggcagaagaatcgctcgaacctaggaggcggaggttgcagtgagcagaaattgcaccactgcactccagcctgggtgacagagcgagactctgtctcaaaaaaaaaaaaaaaaaaaaaaagtctgttgcttgacaatggctaaccttagtagaggttttgtggtacagttcactgatctttttccttcattattcagctttgttttcttgagttttatattaaatgtttttaaaaatattttggtaattatgcaggttaataaattataaaggatatctatagttttccccatctctttctggcattctaatgacatgaatgcagattccttattgatccatataagaatgagctcccagaagtgagtgtaatggaatcaagtagccagaaatacttagtaattggattgtttttcacattctgcactcaacttttatggaaaaaaaaaactcgaatcaaagtatatcaataagatgataaatccattcattccttttcagtatccagtccagtccatttaccagggagtagccaccaccatctgtgcctcaatattttcaaactaaacaacaattgtagtttctgtgcttaaaatattgatggaattagtgattccccatctccttcgtatacatttcagactctttatctgtcctacaagaccagtgtctcccacccttgctgccttgcttttaattcctcaaacagtgagatcaccatagagcttccggcccataacaggtcagcaaagtcttagtcatttaacaggtccaaacttaaataccacttccttagaaagcctttcttctttcaaccaaaattaagtcggccccctttaatgatacctcttagcacctctgttctccctcctagcactttgtgtacattttaactacatattgctttctatttgtttgatgccagtcttgctccacttgacaatattctcatgcccataatggtgtgactctggctagtttgttcttcattatgcacccatcacctggcacgatgcctggcaagggagtaaaggaggatgggtagatcagtttttcagggaatataaaaatgacagcacagttttatcacaaatgtttaatctttctgtatttccatatttatagcttggagattgcatagtaaacaggaaagaggatgaggttttgaatcaaaattctcatgtttgaatcccagcctggcacttagcacaatcacaaagaactgtaggaggaatgcaatactcacatcatctaattcatggtatggctgcaaggccaaatgagaaaaatggagatgcattcaaaaggtgagagctacatgagaattcatgaacacaaagaagggaaaaacagacacagggcctactcgagggtgaagggtgggaagatggagaggaacagaaaaaataacctttgggtactaagcttattacctgggtgatgaaataatctgtacactaaacccccatgacttcagtttacctacataacaaacctgcacatgtacccctgaacctaaaataaaagttttttaaaaagtaattgaaatgttcgtaactcaaaggataaatgcttgcggggatggataccccattctccattgtgtgactagttcactttgcatatctgtatgaaaacatctaatgtacttcatatatatatatatatatatacacgtatatatatatatatatacacatatatatatatacgtatatatatatatatatatatacacatacctactacctaccctcaaaaattcttagaaatttttttaaagaataaaattagacccctatctctcaccatgtacaaaaataaaatcaaaattggttgaaaacttaagtcgaagacttcaaactatcaagttactacaagaaaacattggggaaaatctataggacataggtctgggcaaagatttcttgagcaatatcccacaagcacaggcaaccaaggcaaacataggcaaatgggatcacataggttaaaaatcttctgtacagcaaaggatgcaatcaacgaagtgaaggaacaccccacagaatggaagaaagtatttgccaactatccctctgacaagggattaatcaccagaatatataacaactctataggaaaaaaactaataatccaatcaaaaaatcagcaaaatatttgaatagacatttctcaaaagaagacatacaaatggcagtcatatgaaaaggtgctcagcatcatcaattatcagagaaatgcaaatcaaaactataatgagatttcatctcaccccagttaaaatggcttatgtccaaaaaacaggcaataaataacaaaagctgtcaaggatgtggagaaagggaacccttgtaccctgctggtaggaatgtaaattagtacaaccactatggagaaccatttggaggtttctcaaaaaactaaaaattgagctaccatatgactcagcaatcccattgctgggcatacacccaaaagaaaggaaatcagtatgttgaagaaatatcttcattcctatgtttgtttcagcactgtttacaatagccaagatttggaagcaacctaagttgcatccatcagcagatggatggataaacaaaatgtggtacatatatacaatggagtactattcagccgtagaaaagaatgagatccagtcatttgcaagaatttggatggaactggagattattacattagatgaaataagcctggcacagaaagacaaatgtggcatgttctcatttatctgtgggatctaaaaatcaaagcaattgaactcatgggtttagagagtagaaggatggttaccagaggctgggaagagtagtggagggttggggagaggaggggatgcttaatgggttaaaaaaatagaatgaatgcataagacctactatttgatagcacaataaggtgattatagtcaataataacttaagcgtatatttttaaataacttaaaaaatgtaattagattgtttgtaactcaaaggataaattcttgaggggatggataccccattctccatgatgtgcttgtttcacattgcatgcctgtatcaaaacatctcatgtgccccaataaatatacctcctatatgccacaaattaaaaaaaaattaaaaaattaagaaaaaaattgttctcaagtgattaaaactaagatggctgggtaatttaagctctgtattgggtataagcagaacatactttttctaaaccttgtgaattttttaagtggttacaaaatattataggatcagactttgtaatttcataaatattattattacaaataatgtatccagagcgatctcaattatgaagtcatcaaggatgggtaagaaaattacagagagaagcaataaatctgaatgtacagtgcttatcttcaagtaacttaaaaggaactatgaacaaatgttcatagttttttgggatacattaaatgacttagtgatacttaagaagatactttgattgatgttactaagaaataataaatgagtaaagcatgattgtagttatggtgtgagtaatgatatgacaggatcatgtgatagacattgggggtaagataaagatcataacaatagcaaacacttatatagtacttatgatgtgtactttattatattatgtatatattatattgtgtaaccacttgatacattaacttatttaatcctcccaaccacactctatgaaatatataccatcttaatctttctttcgttgatgaagaaactggggcacatagagattttggtacttgctcagtaagtagcacaatcaggatttgaacccagataagttggctcttaaccaatacacagatctgcctcttttgtgatttaatcaaaataaactctaaataaagacattacaataaagacattaattagctgctaatcagctaattaagttaaaaatgtaaaaagtgctaattgaacataaaggagagtgacaaaagtgtgaaatgttcaggattatctaatataataaaaagcttatcaaaggtaaaaaagttttcattggaaaagattcatgaacaagcattctagaaattaagaaatggtaaatggccaataagcatgttgtaaatatttcaatcatagtcttttggttttcagtgctatctatagactgacaccttccttatgtatatgctcaggcctaaacacatgaactccagtcccccgtagtcaatggccttctaaaaatatcttaggcaatccagaaccaacaaattttttttcttcctacaccaagtgtccctcccttagaccagaagcttaggagtcaagcatccttctttcattctctacatccctacatctgttccatcaccaaatcctctatgaacaatactttccagactcacgtcaatgaggcttctgccttgggtctgcttcatttgtgcttctcccagtgatctgcaaatctcaactcagataaaacctcatcagagatgccttccctgcctatcgcatctaacatgctaactttgctccactccctccctcatcactctcaatgcccttatattagaaatgcttctttttttctcattaaatgttagtagactttatttttaagagcagctttaggttcacagcaacatcgggcagaaggtgcagagttcccatttatccttgcctccacacgtgtatacccttacccattatcatcctcttccacagagtggacctccactgacatgtttttattacccaaagtccatagtatacactaagattcgctcttggtgttgtacatcctatggctttaggctaatatataatgacatgtacttaccattatagtgtcatatgaagtagcttcactgctctgaaaagcctccgtgttccatctattcattcatacagccctcccccaacccctggcaaactctgatcactttttatcgtctctatagttttgcctttatctttttttgtctttcatctcacccctcttaataaaaaccattttaatttgttcattactatattcccaggttatggaatagtgctaggcatataatagatgacttttaaatagctgctgagttaatgaattattatatatatacacacacatacattatatcagtcatatgtaattatatacaaattatatgacatgtagatatataatatatttaatgatatacttgtattattattatatatgtatatatagatatatataggcattatataaaatactcattttgatggggatactgggaagtggaccactcatatcttagtgatggtagtataaattcaatgttctggaaaacaattagtcaactaatatctgaaatagtagagcattcatcaacgtttacccgataactctaaaaagtgtccctaaagatgcatcattctgtatccatcaatgtcagctttgttaagtgaatgttccacatctataaaaatagtacatgcaattatttgaaaagttatgctaccaaaaatactgactggcatatatagtaaagcaaataaagtttactaaataatatgtaagtattcatcttaatgtttttcttaattatgtgcacatatatttgtatagaaaaaagacaggaaagattatctataataattttaccatggctatctctgggtagtgtaattatggatcattgttttcttcatttgttttataatctttaaagtttatatcataaacatatttgtacttaggaaaatacagatagtacttttaaaagagttctgtttagttctccaagaactaaattttatcatttgtttaataagtatttcatgagcaatactaaactctcaaaatttgttaagtgctctgaagtttacaaagataaataaaaagcatatctgctctcaaatggtttatgttatcattaccttggtttatcatgggacaaagcaataattagacttaaatttaaaatttaatggggttttgggagatgaactatggtcttgaaaacaaaagggacatgtatgaaaccacaggtttctatctactattcattgagacgttgcttagccttttctaaactcagtttttatatctgtgaaataagaacattgagagaaacgaatgataaaatgaatgtactctaaagtagtatttcagatttcatttgataatacctccaagcaattaatctcacttatgttaaaaatatttttcacatttttttgtaatttatttgtaaatagaaaatatgttcgggattctaacaattgttgggataatgacagaaataattttctctgcagatctttcccccatcaactcatccatctttcccccatcaactcatccatctttccaaccattgattcatccatccattcatccagtttttataggatctttcctagacaaagcactgtgttgggcaccatggtatctctttaattacttttctcctttaacagtcctttaagactatgtatacattagaaaataattaatctggtatggtcagctatctatatgaccattttgagtcagctacatagctgatatgaatgaacttgatgaactccaatattaagcaggccaaaattaagatgctcagtgaagtttcagcagcatcacttgaagaaaggaaagtcagtgccttcctgtgttgggctgtggcccaaacacacaaggagtgtaagtttaaaaggcattctcaaactggaacacatccaaatcagttaacaaggctagaagatggttgagaaaacatactatatggaaactagttggagagaacagagatgtttaacctgaaatggggaaatttagtggaaaggaaggcaaatgcttaaaaatacctgaggttctagcccacgaatggtaccagaggcttgctctcagggattagaggtaaggttctaaggagttcagtgttgttagcatgaccaaccatatgcactttttgcccaagatagtcccagtttatgcctgctgcatgcagctcagttcactcctattaattacttagagtgccccatttcactcagaatgtctcaatgtgaacaaaaggttatatttgccctaagttttgtagaacccatacaattctttgttctacatcagaaagagctttccaatgataaagactattcaataatgtgatgggacaacttgccaagtgactattttcctgtcactggtaaggcacaagcagagacctggggtcacctgtctgggatgttctaggtaaggattccttatttggtgagaggataaagttggtgacttttaagttttctgccttctgattttaagattctgttgttttgtttttgaatattctatggtcaaatatcagttccatgacatacctacgaaaacacaatttttaaaatatactctttctctcgctaacatgaagacttctccattttacatttcattgaatttctgtggatgttgactaattctggagatgtggcaaattcatactagtagttctgtgtgtgataccttgtggaatgatgggaatccctgctatgataaagaaataagaccgggaggtactgtttaagaatatgacctggacagaaaataaatccaacatttattgaaatttgtttatttaatattgtaaatggtttgcttttatatagatttaatatatttaatagttattctatattataaatcattcactatagcaggctgtttcagggtgtaaaattaagagcgcactgcctttgaacttaaacggcccatgttagaatcctcagtgtgccagttacatcagttctgcgatttgaaatgaaatatttaacttctctctgagcctcaccttattccgtatatcctacaaagagaaaacactacaattttggagtgtaattctgaggattagaaataattatgttaaataaccttgtacacagtatgctttcaaaaagttcgctctggtgaaagactgttttgtgaacatgaaatctattttaacctacttgtcactatttaatgctgctctgtttgtgcatccttgtgttcaaggttgactgtccatttgttagcacatctgcatattcctcataattaatatctttttaaatgacatatggtttagtgactggaaatcgagtcttgccttctgttttcaatttgttcatgactcaatgactcaatatatgtgtctgaactttaattttccattctggaaagtagaatttaaaacccttgctcatatgtagctatttcggaaaatgatgaagaaatgtgtaatccaaggattttgaatatgtgccaggctattcagcgatgcagcatataggtaaaaggccgcagtttctctaatgttaacagagaagcctaaatgagaatgccaaaaatgtaatccctgaagtgaggggataatttggggtaggctagagtcagattcctagtgaattagcaagaagcaccacatctaaatggaatgagcacaggaagagttggtgggagccctagggaatgaggctgagaacatcattaacctggatgaacaactgatagtacccccagggcagtgcttctgcaagccagggatctctgaaagacaaggcccagtgcacccctggaagtgagtttctaacttccgagtcccccgtagcatttatacctcttttgtgctgagtactctttttttggtgatacagttatttgagtcaggtctaatctgttaaacataaagtagattatttgattccgccttctacctattctgccctttccctgcctctaacaagaaccttgtgcagagtggtattcagtgtcttgtattatagaattgaatttgatacaaaatattacaggcttatttgatattttaatgcagcattttatttcactattttgaaatgcacacacacaggcaaaaaacaaaacacacctcaaaagtaacatgttggtgggatgtcctgagaaagaattcagtgcatatggaaagcacagtgaattcattttctccctaaaatattcttcttcttgtccccacagacttggtagccaccaactacgtttgtaaagcctctgtttttgcctttgagagctcactcccagagttttataaatctgcagggagcaaaggtttaggacatgtgtaaataaatcattttatattttttcgtttgttttattttgttttgttttcttagagaagtttaggacatgtataagtcattgtctatttggtgttttgttttcttttgtttttcatatagatgagagtccagtggcgtatatcatttttaaagtttaataaaattatacattcaaaagattataccatctcaattattccaatctgtgatttaatttattgcttaatgttttgtatgaatttgattttctgaagcaggttaaatttgaaattttattaaaaacccacttcctttgagtttatagattgggatagctgttttatctagtcgctgtgtagaattagtatttactggacaagatgtgttgattcaggaggttgtcttggagtgtttgccccgtgagggtcatattaaacttgagagaagttctttgagcaacagagcatcttggagacaatatatcaagctgatggatacagggctcttctgttaagaaaccagcagtggaattatggctggctcccagttattgctttggtgctaaggagcctctaaggattaaatctaggataaaaggggttaaacagaggggaaaggaaggtttccagaattcagtgttactggaagcatacagaatgagtagttatatacaaataatttaagatgaccattctgtttggaaatatttcacaatttaatatattcaaagtgtaccaatttagtggagcatattgttttgttattactcagaagagaattcgtgacatcttattattattataaagcctactttggggcacttcttcctactgtcttaatagaaaggtaatgtagtttttaacacataaggggttttgtgtgcatattaaaaactaattttttcagggctaatgacttgaaattcagaatttggattttcaattacattatactccttgatgtagaaaaattagacaaaaataatcaaaagagagacatggttttatatgttatacattgtatgcattttgcactttattttttgcctgtgttttcacagtgctcttttttctatgtatgcacttattataaatcaattaaagtatatatgtcaaataaattatgattgttaaaaaccatttgtgttcatagataaaaatatcaattaaaaagcctttagcaatgaatgtccttcaaaccaaaaatgtgaaggtaagaagtggatagttggccctggacagcaatcttcttgcactttctagtcatgccacacttttactaattgagagaattatttcatatcatttcctctttcttcaagcctccatttcatccacccaatttgtcactgagcctttgcttttattttgctcactaagaaactgcgcatcatcaaaggagatctttgctattattccatcactgaatctactcactgctctacatcttcatctgtgcattcacttttgcacaatgggagaactatccctgctctgtttggcagccagtgtgcactgactctcagttgattcaaatgtgcactggctcacctctctcttcccacactaggactttgctctggcaattctttcttttacggtatcatttcccctaatctgtgttagattcttccaacaaacatgcctatatgctgcaacatcttccagtctttagaaaaccttcctttgatatcatgagcttttctagctgctgccccattttctaatcccttttagaataaattccctctaagtgttgtctaagctcactgtatctgccctttaccccctcgttgtcttcacaaccttagctcagactgctatgcccagcactgcactgcatctgctctttgcaaagttatcaaatatctgcacttggccaaatgcaaagtttcaactcccagtcttcttcctccttaaactctcagccgagttgatacagctgatacgttcttcctttttcatgtgccttctttctttactcggcttccagtctgcaccttctcagtttttctcctacctcactgaccattccttctcagtatcctttcctagagaggcctcctcctgacctcaacattttggtggattccagggcttggttctcagacctcttctatactcattctatcaacactcacttcctagtttatttcaccatctcagcctttaaagatcacatatatgctgacctacaactcctatgaaggctacaactcctatgaagacttttcctctccctctcctccttagtccgtgttagccacactgttccttaaacacaaccagaatgttttcctccttactgcctttgaatgtactgctatctctggctggattactcttcctccagacattcggatggctacctccctcatgccagtgaagtctctgttcaaatatcactgaattgcattttcttcctataatcttcccatcgaattgaagttgttacctagtaactaaaactgcccaattctttttaccttctctttccttacactgctttatttttctacaaagcacttatggccacctggtattattgtatacacagtattcatttgtttaccacctgctccctccacttgaatgtaagctacctaggggcaggagtggtgtctattttattcagtgctgttcttcttccacatgaagagtactgcttagcacagagtggagccttaataaatgtttattgaacaaatgaatgaattattaatgaactcaaacccattacagcagattgatgaaacatgtaatctaattcttctgttctcatcactggtcattcattagcctcattgttcacagacagcttcttctgaattggagagtatgtaaaattgacacactacacaaggttatgtataaaataaagttgaaaatggaccctgatatttcatttgttctcattattttgatcacttctccttcttcaccaatggcctctggtaatttgtggtcattaggaacctatattacaataatcagaatgttcccaacaaagtatattatactagcaattaaattatgctaaagaaagttcaggtcagtccaatgtaataatagtaataatagttagtgactaataattaccagggtctaaaatcaggtgctttatttatatgatctctgaacttcacaacaattctataaaggaaaaatattatacctactttagagatcagaaaatataggctcggagtcattaggtcattttcctaaaggcagagttttgctgaatttgctttcaagtttctgaatagctttggaacaaactgatatgatttggaacaagctgatatgacaggctcatttgagttataccagttggaaaaaattaattaaataaccagagtcatcttatcaactttttttagtagaataggctttagttttacacattcctgttaggccttctagaaccattcaaagagatttccctggtagattgtaccaagcaggtatgttgaagtcagaacagatttgccggagactcaactagactagaaaaagtggtatgcatgttccaacttgcaaaattgagtaagggcaggagaagggataactctgagaagggtaattgtataaaacacatagggaaaaaagtttactttttatattttcatgggtgagcattaaggctggaatacactgtattcagccattcatgtttatttatcattccagaaaaatacaattttagctaacttcccttcctccaaaaaaaaaaagaaaggaaaagaaagccattgtgttcacatgtagtggtgtgattaaggcagcaatggatgatatcggggggaagaatatgagatctggactgcttcagtgttcaattgtttggtctgttgaacaaagagttaaatgaaaaaggtactttaatatttgcttcactaaattccctccatgttttcaattagataaacagaagtacaggtgggaatgtgctgcatattcatttgtcttgctgtttgggggccggcttttaagactgaaatactaatgtaattgtgttgaaatgaacaataaggaagtacaggagttcaggaatgaaaatgttaaattaaatggaccatgtttaacattgttgttgatcctgaggaacagtttttccagtatatggagcatttcgattccatccagcatatgttctccacagttttctctgctctaattcatctgtgtttttcgacagctccagatggcgtgctgcctcccaggctttcatctgccactccaaccagtcttcaggttgtctggtctacaccagctcgtaataacgctcctggctctcccagataccaactccagatgaggtctggcgactccacccatggatttctagagtgagcattctactttgtccattctatcagctgggttatacaatatagacataacatttttgaagagtaggtcagttctcatttgcaaaaaatataggttaccttttaaaagtacaaaaaaaccccaaacaattagaggataatcatttgctttgcaaaaatatctatttttcatttatgtagcatttaaagtaggatttcttcccactgaaacttttcatgagcacatgcattacataaagcaatgaaactaacaaaatgatgtctgaactgtcgctaacaaattataatacctattctacaaatccacatggcagtcagtctcaatactactaggatttacatctcgtataaacacaagattacagactcagccaatggctacttattttaaaagagatctcatttgatggcagaaaattacaatacttaaatgtatgttgacatcctctaaaatttttttgtagtaagaaatttacttgcttttatttctttgaatgtcgaaaacttcctaattgacatttatttcccatacaggttattttccaatccttctgcatcgttaagctatgaagtgagtgatctccaaccgtacacagagtatatgtttcggttggttgcctccaatggatttggcagtgcacatagttcttggattccattcatgaccgcagaggacagtaagtggtctgaacaatacacagccaaatgtcttctacatagggagcttaaaatgtcttcaattttttccaaagcaaagaaatgagcctcccttatttacttgttgtttagtgacaataaccttttctagggcaagagagtgagcaaaggtggtcagtctctccagaaagaagaataatgtggtcttggagggttggagggttaggcctacagacaggacaaagtaattcactataaattatgatatggccccattctatccttcagggtacatcttagcgccctgcaagagaaaggttgtcatcttctgctttatgactgaatgttctctgtttcggagaaattctggcaggcagaagaaaatgaaatatggaccttacttcatgaggctgcttacatatacttgttcctggaaacaggtttcattttcctgcttctactcataccccaaagacagccttcagcatagagaagtataatctgatagcagtatattacaaaaggtggattaagatttctttattcaaccaataaagagaattttctagttgttcactaaaaagttatttttgcatatatttgctagattatatttgggaataaatacatgactataacatttggttttatacaaattacctctataaaagcatatatatgaaagtagaggggtttttaaagaaaagttagaaattaaatcaagctacacagagtgaataaggacattgtatctttgaacagttaggttttttgagttaatcttgtgaagtcttttaatcataggcttcttaggcaatgttctctgctggcccattgccatgctggctctatatccaatgagaacgttaagtgactttcaaaagcctagatattaacacaaaagtatggtatttgcaacaatatcaattgtttattaaatgtattgttttatttctataatacctttaattgcattattttagtgaagataagacatcaaattagacattatcagtacaatctatcttgtttaaagttgactttatttttacaaaaaaaagccacctttatgagcaataatgtatgttacttaattcatttcttccaattcgtaattactccctgggagaaagttagctactttgcaaggggacactcagtgtttttgttctcaagggtatcatttagtaaattatcagcacagtacgataaatggcacccaaagtccagaaagcattaattcaccaccttttaggaggaacattacatacactctggggaatctggacaccatgatcaccagatttatggactgaagacttcacactcaaaatagatttttgaagaaacatttgaaacaactgaagatagatttgtaatctccttcttatatatagcagcatgcttgatggcactaaataaagattagccaaaaataattattcaacccactgcagaggtgatggctcaatagaatgcttggaagaagggagaaagcattttttttttggcacagcattctttattctcctagagaaagggcaacactcaaacttcctcagcggtaatctccccacaattttcactgaatgagggccatgacctgccatctataggcagggaggtagcacataaataagcaaaagtccaaaatattgtaaaataccaattagcatagcatcctttgttgagcaaacttacctttggtctcctttttactataaaacaagccttatagaccacacatacacatcgttagaattttcatacccagagaccctccattgttgtggtatttagggcttgagtttaaagtgagtggtattaacccttcattttccttaagtaagaattagtaacacttgaataaatagcaggtatcaactcataaccattatttgtgtttaaatccgttccccaaaatgaatgaactcttccttcctctgctttgtgtatacactgtgaagtcacatacatagcaaagaactggaaggaggccatgtgtacctgcaggttacgttagcagtgcacctgagacatggtgacagggtactgtatattttagatgtcagtggagatggatgccatctctgaaaggatatgcaattgagttgacaaagactgagtgattggcattgggcacaagcagtttttctgtcaaggctacaaagcattgcttataaaaccacccatgttgacagctccatgccagaatcacacttcttacttgatcctgaccagcacctcctgctcaccaaagtgcaattttctttctctttctttcttctttctttgtttctttctttcccctctctctctttcactttctttctttctcactctctttctctttctctctctttctttctttctctttctttcttttcttcctttccttcattttttgagacagcgtttcactctatcgcccaggctggagtgcagtggcaccatgtcagctcactgcaacctctgtctcctgggttcaagcaattcttctgccttagcctcccaagtagctgggattacagatgcccaccaccacacccagctaatttttttaatatttttattagagatgggtttcaccatgttggccaggctggtctcgaactcctgacctcaggtgatccagccgcctcagcctcccaaagtgctgggattactggtgtgagccacctcacccaacccaaagtgcaattttcaatgtagaaatttcacatatcgtcttacagaacgaaacagagaagtcgcctcgtgcccacatttaaattccataccatcaacaggcacctttctgcatcagccacagcctcacagctttccagtgccaaaatgggtcaccaatggcaatatttttagtgtgacatttcaagacagtgattttcagcaagcctgtgacacaggtgaaaccacaaagagaaatctaggcaggcaatgagctacagccagagaagcaaatgcatgggtgcagagaagttatcatggacagggaaacaggatgtgaagaattttaatagatttttttttcaaataatttgtcatttacaccagtgtgccaccaatatccagttccatgcatttttaaaaatctagtgtgctgatgccaaataatcataatgcacatttcctatgaatattttaaatcctgttaaatgtgtgttaataaaagatgtttgttccagccaatttggtcagtgtagtgtttaactggttgcaaccagataaatacaaacaacacattattttttaaatgtgctgctggcagtccaagcacctggcatgtccacagcttgcaaaaatgtcctaagattatgttaggcttgggagcatgtgattaataaaatgaaggcacttgcctagcagctgaaaatgttgatatcttgaaaacaaagataaccatcactcctgattatatgattgttccttctctctcgtatgtttgcaattgttttctgtatagtacatgcatgtagaaattagagttggcagggagggcaagtttttcaaacctcagcttaaatgtggatgtattcttttgcctaccgaaatcctgccttgtgttaactatgaattaacctactttttcttaaaattgtggattccccagcccaaaaaagttagataatctgtttctcttaagatttcccaggaaataagattgaaatatggaatatctaatttcagtcattttaatgacaaacatatatggcatacacaagcaattagatcaactaatgaaattgaaatcattttctaaaaatcacttccctaccctcaaaaaaaaaaaccccaaacttgaattcactttagattttaacaatttagttgtcatatatttaaaaatgtttgatcgtttcccaaatttgtagtttaaaattccatatttatatttttaaccactagtctaagaggcactactgcataaaacctgtagaattcgaacagtttattctgtaggtttacttagacaacttttcatttgttcattattttgatgacacagtgatattttaagtacagttatatgctgcacaacatttcagttgatgatgaaccacatatatgacggtggacccataagatgatgatatcatatttttactgtaccttttctgtgttgagatacacacttatcattgtgtgacaaatgcctacagtattcagtacagtaacatgctgtacaggtttgtagcctaggagcaacaggctataccacacaaactagctgtgtagtgggctataccatctaggtttgtgtaagaacactctaggatgtttgtacaacaatgaaatcgcctaatggtgcatctgtcagaatgtattcctgtcattaggtgacacaagactgtaccattgccatgctatatttgctcattgcattacatcttgttattttttcacatttataattgcactgtgaacagaggagagggcaatgaaggaaattgtcttactgcctgggtcctgctttacttttcccctcagcaaccttcatccatccttcagatactcacagtaatttacaaaggaacagaggttcttctggagtaagacagaaaggcaatgtgaggtcaattgaaatctagatctaacagaacatgcttcttcctcttttgttgcctgacataattctacacattcatcaagccccagctcaagtgtcacttcctctgtgaagttttccttcttgttgctcccttagaattttggtttgtgtttactagtgaatcatcaatatccccttctgaattgtaacgtctcaagacctagggatctgtctcaactatctttctatcaccagtgtctggcgaagggtctgatatagagtaggtgccccaaaattcttactcaaagtactgattaaaagcagagtttgattgaagtaaatccacaaaaactcaatcaagcaaacatttaccgtgtacctactgtgtaccagggactaaaagagatatgaaagttgcaaggatggatatgatactgtttttcccttgagatttcctctgtctggcaaggagcacacacagtaaaaccatagttagagtgaaagagctgagttgtccatgagagcaagctcagaggaagggcatggcccctcaacatgagggccaggaaagcctacccagagaagaccaggagaggaattggaaatgatttatatttggagtgcactttaatatcaaagttcaaatttacaccatctccacttgttcagggtaaggctggaaagcaattgctgtaagagagcactgacatatgagacctgaagagggactctcaggttgtcctgtcggtcgttccagcctctgagtatgaggcgaggagggtggggacaagaggtgaatgtaagagagggacatcccaaaagtgattctcatttttttaccttggtcagaggcaggcttctggctgtccctctgattcaatattggctgctgtcttggctaggttaacgaatgttctagttagagaggcttctgccagccccaaatcatgtgctattcggaatgaaggggagggatgtgtagaaagaattctaaaacaaaaccatttttcctgtttttattctcacaacctgtaataagagtaaaatactctgagaccgtgtaacagaagaggaaggaaacatgtggtataaaatttgataaattgatcaagataattctagagtaggacttccgaatcatttaagtgcacatatgcccttaagattactgaaattttaaaactaatattgcatgacaaacatcttatgtttagggcattttagaatttaaagtttcacttgcatccttaaaatcattctacgcaacacaaggaaaatcggaatatttttaaatgagagtggaacatatttatatgagtacattttatttaatgaagaaagaggaactacaagtttcagtagtgctacacaactattttgctttctccattccaaatatttttccagttgccttaagtactaacctctgattgctgacatgtttttcctttcaaacagtaattcaggtatctattttgcatagaacagaagacccatgatcaaaaataacatttataatcttctgattttgagagcaaaatggttctgcatgttttcactacatactttgttttctgttgcatagattttctccacaaattcctgaattttcagaattaacaaattcaaatatttacaattatttttatattttatttttataatgtaagatcaaaaggaacttattcaagccaaaaatgaccaatacggaatcctttgaaaggatggattgattaatcaaaaattctatccaccttgcctcaatttcccacttaagctctcgaatctcccctgggcacttaaagcacactcctcttccaaatatagagtgcttgtaatgtctgtgtttcttacagctgaagactgcaggtgaaagtaatgaaaaatcaagttttttatgtttactttaagaaattaatgaaaaataattttatcatagctgccttattatcactacttaaattttattgagggtgtattatatgcaagacactttagcaggaaaagtatatcctctcattatccagaaatgctatctgctggccttccactatttttaaaaactattcttgttctttagctttgaaaaagttaaattgtcaatatttgaaaactctcagtggactatgtgagatcattcaaagataattgccacaggttgatatttaatggcatgagtttagttttaattctcaaatcttaaattcttagagagtcaagtatctaaaaactgctggttattaacaaaaagatggatgtttaccataatcattttctatagcattttctatagcacctgcctataaaagaacattctgcaatgctaaaacaatacatagattcatttaatcttgttgtcttcctcattttgataatgtacctgtaaacagagttgatttgctatatttggaataattcagataagttttgcccaaatataaggagtgaatgtgatgacctttaggttttttaggatgttttcctgacttcatgaattctcacatcaatgcattttattttctgcaccaaattatcgcagatgcatctactacgattcaccccacaatatgccccagctctagaggttgaaacattctttctaaacaatactctcctgatatcaggagaaatagagaaaaatagttcccgaatattggttctcctatttgcaaactatcaaataatgtccttccaattccaacagccttttagccttcagaggtttctttcattaaataatgttacttatgttatacagcccatttccttttttatcagagtcaggctgaaagttcatttttctgcaaaactgcagtgcccattcttaatttttgttttgagaaataactgttgtaccctctttattatcacaagattaataatatttctttattttattgctcctcttacatttggatcttttattatgagctgtcaaaaattcttttgggaagtagttggggtataaataataaatcgataaaagaattcatgattaaagacaagatagaatccattattctgttaacatatcagtagtgaataacaaaaggctacattgacaattagcatgcaatatattgctttatataattatacatccatatatttgccactttgatttttaattcactggtaaatttaggggatactcatttatggagttaatattaccaaaaagagtttttaaactgagcgaggctttaattagaatggtaaaatattgcttcagggcaacaatgagaatgtaacaagaaaactgactgatcagtcatgggtaactcgaatagcaaacaagtagagaagactcacaaaaccactgaaagttatatacacactcaagttgtgagtcattcaaactgggtattcatacacatgtatacaaatacaaacaagtgtgtgcgcacacaccctttccaatatacacacctgaatataaaactaaataagcagattcctctgttaacaattttattactctattttaggctggggctgaacttttgaagctgatgagcaaaatagtttcccataaaagataatttcatttgccaaaatgaaactactttccgttattaatgttgcaatgaaatggtttgaaatatgagtctgtgatctggacagaaaggatgctcctgttcccagctccaagagggagttctctaaacaattacacccacggagagcgctgtaaggttgtattttcatcaccggccagctgagctgtgtgcctgtcatactcccagtctcccctccagtgacagccgcattgacaacatgttatactccacattgattttacagttaaggagctgattgtgatatatagagattttaagaattcagctgagaggctgacttttgccttttatcattccattaaaattttataaccatctttttcatgtcatttcatccatgaattcttactttagaaagtgatagctactgctgtgagcataacttttctcatgttcagagctttttattgtattagcaaactaccccaattatagttattactcatgttttacataattgtggtggccctttcaaccatgcagttgcaggccagttgatttgtatatagaattagatgattcggcttatcattttaaagcactaaattgaaagagtgccaggagtcaggttttaacacttccctagccaaaggagctaattaagctgctttcagcttcctctccagaatcacacaagttaaaggacccttctgcaacaagagcagcgaatctactcagccagagcaggaagctaataaaatgtatgctggcttttaagggggaaacaaatcatgaaattgaaattgaacacctctcctttcccaagataagagatcatctttaagaaaaggctgtgtattgtgggggtttgaagtgcaagttcatctcattatcatggatgtttcacccataatactatcatcatatgcaggagaaataaaagccttatcccccaatcacagagaacaaactgcatcattgttgtttcttttccctgaagatgctcacagtttgatagttcacatatgaggaataattatgcaagacccagatgaaaaccctaataaaaaatattctgatttttaagtgtatattactctctttggggaagagagggtgagataaggttagacattaaagacttgaatctccaccattgattttacgaaacccaatctcaggggatttgggggtttttttagatttcaaaacaacattgatatcttacaagactcgtacttgcttttctctgggaaatagccaaatctagatgacaagcataaataagaaaggagctgtatccccattttgatataataattgctactgctactgtataccagagagcaaaagtaagaaatggcatagtggttttaagaaagctttaaaatgaaagctaacaagagactgaaacggaaagtgtgatttataccatgactgctggttttagggttttttttagggatttctcttcaaataggatacattaccaaattgtcagaaatagcttgatttcagagttagtgcactataacatcttttgcttcgaaaagtgattatgattctaccatcagtccagttggtgacaaatacgtggatcctgttgtgtgaaagtgtactcatataaccaactattattgcagtcactggccctgcaaagcagtggttgcatttaaaatttcaaccttctttgtaacactgaatcgcatacacacactcacaagatcaacgctgttttaaacaattactaaatccaagtatatcttttttaaagattttcaataaaatctaatgttcacagaaaaatctcataaatgtcaaaattgctgtgggcagaaaaggggggatacagtattttcttgatctgttttagcaatttatagatttcaggccgtggtttataagaatgctaaatgttctggaattacagctgttactgatcagtgattgagccagatttgtgttattgcaccatgttcttgcttgtacctagagagcagtaaagcctcaatataataaaaagcacctgcattttaaatgaaatttcaattgaaaaacttaacagcccttcaaattgcagaatttaacgcagcccagtaaagcttaaataacactttgcccccgcaggctgaggggtttgcattcaaggtgacttgattgtgtcgcatggtgaaattatttacaattaaggaatttctctggagggctgcagaatatttgctgttccacaacacctatgcaggcatatggtgggcctttttcagtattcatggagcctcctgaacctttatgataattgaatcagttagagtgctgagtggagcaagcataaaacctgttaacctaaaggtcagatctgtgcattgtttatttatcagtaggtgaaagagctaaatcggcagcttctgtcacagccacagtaaaaaatcgcctataatattaacagggagtagataaattgcaaaacatggattagaatgataaacagaaccaagtataatatagaatatataatgagagatgctgaaggattttactgggctgtaaaatatgcaagtttgttatgatagtgttattgattataattagttactggggctctagaaaaaaatgtaggggaagctagaactttagtaacaactaccctcttgtatgtttattaaatttatttttttaaatcctcattttttaaccaatggcttgaataaaaagacatgattttgataaagctgtcttagagaggaaaatgatcattttagtttcataatattcaacaagtatttcacacgcaaaatttatgagcaaagcaatcacagtccttgtctttatggcacttatttatttacttattggcctttaccaagtgttcattttcatatccttgtagcagagctatcactcattttagctttgaggagaggtgggacatttccaagaggtctgactttctggatttattttactttacagaacctggacctgtagttcctccgattcttctggatgtgaagtcaagaatgatgttggtcacctggcagcatcctagaaaatccaatggggttattacccattataacatttatctacatggccgtctatacttgagaactcctggaaatgtcactaattgcacagtgatgcatttacacccatacactgcctataagtttcaggtagaagcctgcacttcaaaaggatgttccctttcaccagagtcccagactgtatggacactcccaggggcaccggaagggatcccaagtccagagctgttctctgatactccaacatctgtgattatatcttggcaaccccctacccaccccaatggcttggtggagaatttcacaattgagagaagagtcaaaggaaaggaagaagttactaccctggtgactctcccgaggagtcattccatgaggtttattgacaagacttctgctcttagcccatggacaaaatatgaatatcgggtactgatgagcactcttcatggaggcacaaacagcagtgcttgggtagaagttaccacaagaccctcacgacctgctggggtgcagccacctgtggtgacagtgctggaacccgatgcagtccaggtaagatactgactattctctctcctttgcagacttaggaatgtaccctggattgactctgtgttgaacagagccatctactgactaaacaaacgcatttgttgttttaggcattcactggagaaactgggttttggcctttggcccaaactatcttaaattcgatgtcagtttttcatttatccctgtatccccttaattatattgttgagatgcttccatttgcctcgcacacctgaaatattttgaatgccacaatgatgcttagcttaaccaccacgtcagatttaaatagatcagaaaatgagaagagatgggaaaataaggaggaatgaattagcatattaacaaaattttccattaccaatagtctggtattttttaataatcaaagaatcaaagtaatggggaaagaaataaaaatagcatattaacgggctatccagaaagtgttcaattattcacctcattctattgggaatgaactctagtggacaggataactaccattgttttggctggcatacaaacttcattcaagggaaattagtgtaaccaaacaggagggagttttgtagcttagaagcctcttttgtgtaaatacacacaggcttccatggattcagtcttgtactactgccaaaagcattggtacagtagcttgctcaccggagcacaaaacaaaggacatttgcataacagcaaagttcatctgctgaaattattacttggatctatgttgtgtgttctctctcccccaccaaaagcaaacactaggtgatgctaaacagtgtaaattgttggagaaatttaatttaacctacaaattaaaagctatttttaaaagtctttgttagttttaatatgaagctggtcaaagcaacacacatttttgatataaatatgtgtatagaattccattcattaaacactaatgggaaattaattttaagtacacgatatacgatgtttattgtatgaactgagcaatgtaaagaattgctcttgattcaaaataaaaacaaaaccaaaaacaaaacccaagcatagagttaataatcattccagaaatgactttttttttcaatcttgggggagttttgtaaaactttggtagcagtaccaatcactatgatgcaacaaaacaaacacagtctctttacaaaggcaacactacataatggacattgttctggattatttcgaataaaaatcttataactaggcgttactgattgtggccgatctgaaaaagagtaagtattttcaggccgggtgcggtggctcacgcctgtaatcccagtactttgggaggccgaggcaggcagatcatgaggtcaggagatcgagaccatcctggccaacacagtgaaaccccgtctctactaaaaatacaaaaaattagccaggcttggtggcgggcacctatagtcccagctactcgggaggctgaggcaggagaatggcgtgaacctgggaggcggagcttgcagtgagccgagattatgccactgcactccagcctgggcgacagagcgagactccatctcaaaagaaaaaaaaaataagtattttcagaggaggaactcagtgtacaattctgcttgattcagcatatataaacaataattaaaagtatcagcttgcctggctttttcttcacatttttaccctcttttgattttgtaatatcatccatgaattaaacaatatacatggcttgtcagcctgctagagaagtttagattagcgtggctagaaagctgaatctcataggcactcacctgaggccacaaggcattggtaaccccaagtcaggaatctcaatgtctctaagaaggtgtctgaaatatatgaacatggtacactagtaatattctaaaaattcacactttttattctcatcttataactaggaaataaaaagttatcaatagaatcagcaggaatattcaactgagtctagtatttaatgctatatactatttaaagagtattaagataacatatctgtccttcagtattattggctcacatgttcagaacgatcttaagactttaccgaagtggacgttctcgtgatatagcttagctggtaaacagaggtatatgacagctaaacaacgacttctctttgtaaaatatgagatttaaaagtccaaattgcaaatagaaaatattttatatgaaataacagaaggatagtcattaatgcattggttaagaaattaattcaactatttatcatagagggttgttccaggtattaggatggatgaaggaaattgacagtaatattaacagcagtaacaataataatttcagttctattgacatttacggaacatcagtacatgagtgaacatctttgtaagtgcctcttttaggcagtagggacacagaagagatcaagatgaagtccctaggctcatggcgattacattttagacagaatgcaaacaaataactatgtaatatacctggaagtaataaggacttgggggagaagaacaaattgagtgtagagaaatatggaatgccagctgatagggtgggggataatacaaggagcagagttggtatttcaccttagtgttactcattttgtgcaatgtggtttttttctccatacaatgccacctgtaagaattacagtccaatagggaaatcaagagagacaacacatacttaggctaactagaaaataaatgcaatgtaacatattagtaagtactaaaagaggtgatatgacttggtataaatatgagccttgagaaaggcaaattggagagcacagcagcatagatgaaataatatgcttaaaatcttatttgattacaagaaaaataaatatataatgtcaaagagttgtgtcacctgaataagtgaaagccatgcacttttatttaatatttaatcacctaagaaaatgtatttcattttataaggttggtaaaaatgctctaccaagacctaaaacagttcaatgaaactatagactaatttcatttatgagtacagattcaaaatttctaaataaaagattaccaaattgaattaagcagtatattaaaagaatgatatacaaggacaaattgatttcattttaaaaatgtaaggatggttcaacatcaaaaaatctatcaacatatgtcttacatcaaccaattaaagtagaaagcccatatggtttttttttatcaatagatgcagaaaaaaaggcatacaattaagaagttatttctaacaaaaagtcaaagtaaaatcagattaggaagaaggtacttaaatgggataaagtcaatgtataaactgctgtactgaagccttgaattgaggattgataagaaataacatgtataaataactaagttgcatgactatgatgcaccaaaaaaaagaaaaaaaaaacttcttttatgataacatcatgagcctgtaaaccttgatgcccctgtccactttttcacaggtgaagcagaataaaatagagtaatcctgcagctgtcagctcctcttatacagtagggtcctcactcagctcagacaggtgaagccaccagccttggcaggtgcgccacaaggaacagtgtcacccagaccacaaacatgtgtagcttccttccctctgctatgtacacttagggtcactcatttatgggtttgataataaagcaaagtaaaagaagttgagtcttaatcatcatcctcattgacttttaaagatgggccaatgtttgatgtctacttaaaataaaccacagacaaaaagtataaaacagaggaaataaaataataatgaaaatatattcactgagttcatgttatgttctagaaattgctttcatttaattcttactacaactgtgtcagatagatgctattgtcattcccattttacagacaggaaaactgagaatgagggattaagtaatctgcataagattacataaggagtaagagttggaattcacacccaggcaatagggttctggagcctatgttcttctctacttctttacactgcaacaaatggaaaaaaagtgcaatcttcctggatggaaggacttaactccataacaagacaatccttccaaagtcaacatataaactgaacatcattcaaatcagaatgccgatgttttttgtttgttttatttcaaactggataaaataattttttattttttattttactttaagttctgggatacatgtacagaacgtgcaggtttcttacataggtatacatgtgccatggtgatttgttgcacctatcaaaccctcatctaggttttaagccctgcatgcattagttatttgtcctaatgctctccctcccgttaccctccaccccttgacaggccccagtgtgtgatgttcccctccctgtgtccatgtgttctcattgttcaactcccacttacgagtgggaacatgtggtgtttggaacatgaggtgtttggttttctgttcctgtgttagtttactgagaatgatggcttcaaggatgaagctggataaaatgattttgaagtataaatagaagactaaatgattgaaaatattatagaaaattgtggaagaataatgaggtggtactttctgtagtatgtaaacttactttaaagccattgagttataataatatggtattggcatgaaaaagacaaatggtcattggaaccaactagagagtttaggtatagataacgagtatttgttgaaatgacttattgtaggtagaatctgcattttatttcattggtaaagaatggtttgctttaaaaaatgataccagcccgaccaactatcaatgtgtacggaaaaaacagatccctttatcatatcatattataaataaattcccataaattaaaaatgttaatgttaaaaaagtaaaaatcttagaaaaaaaggagaatttcatgtaatctaaatgtaggggagcactttctaaagaaaaaaagaaactcagtagcttaaaaaaaaaagatagctatatgtagctagaaacaatctgattgattttctaaggcataaacttcccccccacccaccaaaaaaagttaacatccaaaagatagatctggaaagtacatctgtaacacatactacagacaaatcaatttcaccttaatatgcataggccttctaataatttataatacaagatactttaatagaaaataatttaggtaagaggatatattaggttggtgcaaaagtaattacggtttttaccattaaaaataatgacaaaaaccacaattaatttttcattcatacctcacataaagtcaagggagtgaaaattaattaaagaaacaagtaatattagcaaaaacgaatatcagtaatttcaagagtttgtggaggcacagatcacggataatttcattgtttatgataaagtgaatttccccaactttttaagaaagtagtatatcaataatgattaaaattaaacatgcattttccttttggcatggcaatacttggtaatctttccaatatgaaataaacacaagagcacatattgcatacattttcaaattttatttttagcataaaataatgtcagtaggattaacaaataatttgttttcaaccatgaaaggaatattatgcaaccataaaaaataatagggtgtgtccataatcaattaagtctgaaaagcaagttccagcataagtggtagagaactttttttctgtgaaaagtttttaaaaaataaaagagaaagagagagagacctaggatatgcaggagtatatttgctttgcttgtacgagcatacaaaaagtatggaagaataaacttcagactattaagttttcacctgagtgaaataaaacagagccacaattaatgtttcttgtatttatatatttgtactctttctctgtctgattgaaaaaatacaaatagaatatttgaaattaaaaattaagattaatatttttaaaggaaaggaagacattgtgaaagacaactttatttcaacaaatatttattgcacatcttgttctgtatgaatttttcaggggagtccatcataagaggaattactacactgtacggagtcaaatattcccacatgatctttctttatggtacatttttatcttctattgacaaaatactcttagaattatgcaatcttatgtctacacacgatggcaaggattgtctcatcacattagacatgagggttccgaggcctggagatgttaaatgttttgcctaaagccacaccgctttgagacatttatcatctcttagtccattcttaacccatatatcaatctttataaatgctcttattcatgaagttcttcaaaatagtttgatggagttaaagaagtgaggaagttgcttactatgcttttgggtgttactcttttcaagcctgaagccaatcaactaacctgcatgtctaagtttctgcttaaaatggggaactttgaaggtgccatgattctttttagagagacttttcagggatgtaaaagagctgctgaaagtcaatcgttccttaaacacttaaccggcaatttagccgtcctattttctgaagacttacaataaacagaaaaaatggaaacctgaatcattaagaaccactcaaataaaagaagtcattgtgataggaaagccatctctgaaataaacattttatttccagtgcaaaactataattctatttaaaagttttaatgtaatattattgttttaaagaacacatttcttgcttattcaggccaataacatgttcttttgtctgaatttttagggatgcaacaatatttcataatctttcttatgtacaatggatatacaaaaggtcataggaaattaaacaaactgaaagttttaatctcatatattttgaccacatatacaataataaatgtggtcttaagcatagaaaagaatagaatacaatatttagttaactggctccttaaaattcttggacatgggcagggcgtggtggctcatgcccgtaatcccagtattttgggaggcaaaggcaggtggatcacctgaggtcaggagttcgagaccagcctggccaacatggcagaacccctctctactaaaactacaaaaattagccgggtgtggtagcacacgcgtatactcctagccactcagggggctgaagcaggagaatcgctcgaacccagaaggcagaggttgcagtgggctgaaatcgcaccgctgcactccaggctgggtgacagagtgagacgctgtcttaaaaaaaaagaaaaaacttgaacacattgattaattgattgattgattgattgagatggagtttcactcttgttgcccaggctggagttcaatggtgcaatctctgctcagtgcagcctccgcctccctggttcaagcaactctcctgcctcagcctcccaggtagctgggattacaggcacctgctaccacacccaggtgatttttggtatttttataccttatacaaacattaattcaagatggattaaagacttaaatgttagacctataaccataaaaaccctagaagaaaacctaggcaataccattcaggacataggcatgggcaaggactaagtattaatggtttaaagtgttgccaagctctgacctgaactctcaaagtattctggtctaagaggcaagaaagccgtattcttcagattagtcaggttgaatttagctgtgatagctcttctttttttcatttctgttacaaataccaggaagctctctgagtttgaccttgactcattttccgggtccacagacagcattgcacctccaaaacaaatagcgtcctatatctgtgctacaacctttgctagttttagggtgtttttaaaaatattccccacatccaggcaaatcctctatgtttataaggaacacatctaaaacttctcttcatcccagcctctcttcttagaactctccaaaaagtttttttaagattcacaatgatttcatcccctgtagtataatttggtagatattggcccattgttaattataaattaccaaagtaatcatcaagcaattgtccaactagcatgtggtgagagcccttttgtcaccaattattagtaagaatactctttaaaaaatctcaggtcatagtcttcctggatgaaaccttctccctttgatttaagatagaaaattatggtcagtccttctccattttaatttctatattgctcctctttggtttgcataggggtacaaatgtacatataaatatgtcaccttgtagaaacctgtctcttaaagtttcaaaataactgtatgctagggaaaaaaatataatctaacaaaacatgactctaattactaactgaactccacctctgtgcacatggtactaagtgaatgtagagtttatccctgctatgaagaagcttacaggctgggacatgagatatatatcctggcatttatataaagagcactagaaggtaccaataaaagagatgaaagaggataacatgtaaataaatgatttttgtcatggcctgtgcacattttttaggatctctttccccataagaacatgagtgtgttaccactatgctcctgtagagtttagccagaaaagaaaataaacttcagacattctagaattctactacaaaatgttgttctttcttctgatgctcaagtccacatgttagctaagcacaaacatctttggcttccctttttcaaagctttctatacattccttatccctgagaagaggatgtgctattaatgctttaattgctaagttatatataaataagattcaggaactcaattttgcatcttcggaaaatatgaataatgatttctctttcccttcctccaagaaaaagtgacttatttggcagtcacactaacagtgcaaagaaatgagttctgatgtttcatttagttgagttataaacatgaaaaccatcaaatcctatgcaaccctattgaagcatgtggatgtgtgaattttctccatgtgtttgctctgtgtccttcagaacacccacagtggcgatgaatcgctaaggtgtgtatcagtctgacagtcgtagaaagtggcaagactgaaagccaaacccaggaaacagcatttcatttagctcctggagtactgctaattgatctcaaacccttcattactgtctagtccaaaggcctcaggagaatgtagccatttagaaaatgacttaactgaaaacaagagcaaaattctaggcctcgtgaacttcaattgctctattcctgtatcgtcacactgattctaagtttatctttcatttcaggtcacttggaaacccccactcatccagaacggagacatacttagctatgagattcacatgcctgaccctcacatcactttaaccaatgtgacttccgcagtgttaagtcaaaaagttactcatctgattcctttcactaattattctgtcaccattgttgcttgctcagggggtaatgggtaccttggagggtgcacagagagtttacctacctatgttaccactcaccccaccgtacctcagaatgttggcccattgtctgtgattccactaagtgaatcatatgttgtgatttcttggcaaccaccatccaagccaaatggacctaatttgaggtaagagaaggtgactatgatttttatgttgctgtagtccttatctctctgagaagtagggaaatgaaggaggcttttattcctatatgaacatagaactaatttggcattgaatatcccctgactcataactttcatacactatcatactgtacacttcaacttattatggaaacatcaaagtttatcaatttgaagaactaaaaacccttgaaaccacaatcactattgtctaaggattcgctacataatccatcacttcattttcaacatatgcttttattatatgttaggcaaacctgatgtaggttctatatgatacatttgcacaaatgtacctcagaattctaaggctaacacagtaattctttggcatgttgttagcttatggaaacttgtgaggagtgtggtcagggagcccgatacgatgaaagaaaagagctgtgattcagaaatggttttgcaaccacccaaacttgatacttggccaagaatacaaagttgataatattatcatcgtttataaagtattgatagtcataggaaaccattaacttgataagctttgtgtatttctactttgtgcgaaactggcagtaaagatttggcacatctaacttagaagaaatctaaaatgctatcattctgggagataatagtaaaatgcgaatgtaactgattcttcaaaatattaaatatatggaatttggtccagaaaaaaaaacgttcatctgaaacaaaaccacgtaactgtaaacttaagatgttattctttatgcttccacgcatatatcacacgcacatgccacagaacagcctgagttttggtaatctcaatatgagttgagataatcctgatgttcctgcttgtcttttgctttagatatgagcttctgagacgtaaaatccagcagccacttgcatcaaatcccccagaagatttaaatcggtggcacaatatttattcaggaactcagtggctttatgaagataagggtcttagcaggtgagattacaaaaactataaaaacaaatgctggcatttagttctgggcatgttgaatagttcaaagtatctcagtgtcttcattgtgtgagcgtgttatcagttatgcaataaaacatgtttggttattatctgtggcattaatcacccagctgtaacagtcagcatgtttaatgttttccatcttaactgcatgcttaaaataagccttttgaagttgaacttgtagatgttcaagccttaacctattgcctttgtcacggctccatctagacataaaacgttatggaagaatttggaaatattgaacacatacaaaatggggaaaattcctgggcacttgtagaatgcttgctatttctagaaatggcttataaatgaattataatgacttataattgattgtaagttattgattcagtccgcaaaagaaaacattagtgaacaggattgggacttgaaagaattcaatctagagttcaaagacattcagtaaaggctaataggtgacagtagaaaagggtgctacatgggagagttaggagatctggttctgctttagcctgtgctggagaactagctttgtgactttaggccacaaagcttcactacttaaaaatcacttaacttctctgggcttcatttttgttgtccataaaatgaggtgattttatagaattaaatgacttctaaatcttcatgagttcaagcaatgtgattaaatttcagaaaacatgaacgttattttatgaaaactcctcgatcatatgtttcagtaacttttctatgtgggtcattatttttctagacccaccactgggtagctgtagtctgaaccctgtttaccattctagccttgtctcccatccctttcttaccaaggcctctgcattccagccacatttgtattgcattcagtacctccaacatacaacacttgctctttcagcttttccccatagttgccttttcctgttgcctgactagatcatctgccacgtcttagcctggaggtttcttcctctaggaggcctttcctgccaacactcttgctggtctgattcagctcctctgtaacatttccataggacatcccctaacatatcactattgtcattgtagtgtactggcctgactgcttgtctaaacaccacgttatattatcagatctaccataaggcaggggtgcggtcttcgtgactctgtcttcagttcctagcatggtgtctggcacataccagcacatagtgccctacacctgaatacttaaaaataggttagctcaatcaagaattaattcactgctctgtaccttaggaatattagctgtagtgttcttctctctggggaatggcaaaactaaggaaaattctcctgtcctcttaaaaagttgtggtgggaaaacatcctagttcttgtaagattctcagagagaggcatctcgtaaatctgatcaagcaacagaatgaactatatgaaactgccacttttataggtgaagattggtcaattactagcagatccatgttgcttatcctaaattataatgctcattatactattctcaactacttttaattcattatttacttaatttggcatccctatatgattatcacttcagtagaataaattcatttatttttgcttatttgtgcttactgtgtgctgaggcactgtgataaggaacaaaagataaatacatcttagcccttgacctcaaagaacttataatctagtggaggaacccttccccccgccccctccatagagagtgtgatataatatgtatttttatatattatatacattattaattatatataataatcaatatatattatatatttatatattgattattatatataattaataatatatataattaatatatatattaattgctgtcctcagagttatctacaaagtcaccaattctgcctaaagaaatcacttcaaatagtagcttcctgtgacctatgaactcttaagtgcttaaatataactatttcaaaaaataaatagaacttgactctttaacattactgaatctgagttttagccatgagctactcagcaaaaacaaagaataagtttccaaaagttaattttgtttctttatacaagaaatgaaaacttattaaataattaggaccaaggccatgaagttagttatgaatttttagtgattcctctaaggattcttaatgagaagttcaaatctaagatttcaggaaaaaataaagtgaatttccacaacttaaattgaaacatgaattgacataaacacacccatgacagctgcttccggaagggaagtgtgcagataacaaaattgtgttaaagggatattttgactagtttcataatgccaaatgtcatttttttccggtagtacttgcacagattttttttatttattaaaataacagctacaacttacattaagcttgtagaaaaaaaaaaagcatttcttcttaacattcagtgtaaatggcgtgagtctttataagaatctctttttctagccctctaccctttataagtccataaaaagctaggagtgcctttagcccaagggggagtgtcttgcaaatatgagagaaaaccaaaacttgatcccctggcgggcaggatatttttctctttaaaggaagtgattttgtttggttagatggtgccactggccaccttggcaacatccggggctccttgttcctgctggtcagctagtggtctgtcaaattgcagagggggatgaagctgagtgttcatcatgtgttggttcacccctgtgttactgttccttcatggcccttcctttgcctatatttgttttgctgatttatttgtttggccaggtatgttttcctgggtttttaattgaattctaatatctttgggaggattatgtaatttcctattctccccagattccaccatcccaatttccttcttaacttaacgtctgcataaataaaaggagcactgaagtgtttcttaccatcttgacttgaatatcaccatagttacatttagaatcagcttttaaatggcacttctcctgatataaaaagtaaaattaagattcactagacatctctttatgaatatatttgtgacagtaaatataagttgaagccaatttcctagttcaagtggtctattttggctaagtatgtgtttataacgcatagaaaagcaccaatttaatttaaaacatcattatatttggaacttcagatcattctagtagttattttttcttttatatctacatgtacaaaacagtctcaagtcaattatccagataatttaattctaacaaaaatactttttgctcttatgattatcttaggtaaggagtaatttttgtctaaattgcacagctagttgcctcattatcgaattttgctctgcctgtgtagacacgaattccgtataactacaggtttatactgcttgtcagtttctaacttttcttccttaataattccttgcaaagtgagcaagttatggttgttgggggaactataactttgggtttcctgacattttcatcacttagaaaatctggcgaacgtgctgttatcatctgaagctgccgaagtgagtcaggcagggtttaacaagagggcggcgacctccttcattttaagcatcaatctaccttcacaattttcagcacctaacaacactgccttggttcctaagtgatcagataaaactgctaagaatacaatgagcatgttctccttttcgttgtggatttaaagaagaacaagttataataaacaatagggttattttactattatagagaaaatattgactgtcagattataatttagatttataaattagctttcattaagtttatgaaggaatgtatgttctaattgctattccttttaattatttatacatttctcagagtatttttttttttttttgcaatgacaatttggatggagacctctatgtgattcctcgagaatccactaattgtattacatttaaattaaaacattcaaaattaacacattttcgtcttatttttcaaagaagggtaagacttaagatgtaaatgcttaagctaaatatatcataaattctaagtttaaatcttattgacatatattttcatatatatttttaaatctactaaaataaagatgtttcaagtcctaaaagaggatgccatttctgtgggggataatattcaaaagaacataacttttgttcctcttctttgtaatgagattaaatatgtatagatgacatctgcatctttgctagtatgaaagactgggtcagttccatgacacgtgtttctataatataaataatgtcagattgtagctattaagtgaagaagttaactttgtacatagaaagggcaagtgaaaggaaagcttctcccgtgactaccaagatgagatagatcctgttaatttattccttaatatgggaatgtgaataaaaattgagtctaagaatgaaagccaacttctgtcaacactagtatgccatctcatagccatgcacttaattcaaaaggagtaaacatgtctttcacattcaaattaaattggtcacagtgttttttcccattggatttttttttcaatgccttacatgccctacacgatgtccttttctgtgtcatcatattatgtgttacctccttgtattagcccattttgcaatgctctaaagaaacacctgagactggataatttataaagaaaagtttacttggctcatggttctgcaggctgtacaagaagcctggtgccagcgtcttcctctggtgaaggcttcagggagcttttacccgtggtggaaggtgaaaagggagcaggtatgtcacatggcaagagagggagcaagagggcgctgggaggaatgccatgctcttaaacaaccagctctcccctgagctaatattgtgagggctcactcactaccacagggatgacagcaagccattcataagggattcacccctatgatccaagcacatcccattagggcctacattcaacattggtgatcacatttcaacataagatttggaggggacaaatatccaaactatatcactcatgaaaaatgaacttctaaatccagaaggatgtgttttgtcacaggaggtttttttcccctagtgttttcttagaataaaaaagcagaaaaactactttcattggctgtatttctttctcatggtgatgacaaagtagaacaaagatggaaattactgcaaaattatcttaggtctgacaattctggtagtgtagatatagatagcaacagaaacataacagcttcaagtttcactcacaatctaaaatgtctcatattaaaaatattcaagtgtgatcaacattactcttcaatttttgaagcaaaaatcttcaatactatttttagaatcaacaaatagattttttaaagtgtctaccatcagctgaaaattttaatagctatagacttaagcaatggaaacaatattgcatttcatttttctttgtttgctattcccacaaaagatttgaagatgtaaggaaaagtatgatttatgagatttctcaaatccacacttgtgtgatggtgtactgaaaaatactttgggttgtggcagagatgaggaagagttagtggaagaagcaactaaataacctgcattttcagaagcgtgatttatattggtgacaatattaacacatgaattctgttaggacatcaataaagttgacacatttttaattctgatgaaaataaccccaggcattctgcagctgccctgaagaattttggtttcccacaatatatcagtcccttccaagatacaagccttcacatattttgccctggacaaatgtcttcactggataaaataccacttcttatcaaaacctgccccaaatgttacctcctccgtgaagacttcccagctggatatggttaaattagatgcttcatctgatgcgtgttcaaagaataaggaataaatgaataaattagatgttctcatttaaaaacatatttctgtaaaattttatatacattatggctccaggtggacagataacaattttattatttttaacacctggcatattggtaatatccaataaatattaaatgaatgaacaaatgaatgagtgaagtgatgtattaaatatgaaaaagcaatataatttgttttcaatatatttttaaaagcactttgctaagtttcagcagagatattctttctattggacaggtagatttttatctcactaacctaaaaaattatataagtgacctgaaatttttgagactgagtgcttaaataactatgaaacatctattcattcatttataaaattatctattcagtaaataaacaaattaaaactgcatcatttaaacataatctagttttctaattcattggagtaataacacctgaaccttgaaatgaatattgttccacaagtaagattttaacacatattattttttatgaggaaaattaccatagtcatgtctataccataataaagtttacaatttgctgtttggggagtggaggagggagagaccggaggatggtctcaagcaaatgggggaaaaactattgtaatagtccaagtattcctaaatggacccaaaaacaattggttttactggctacatcatagactcaatataagtattcacttactttgaatacttatattgcaaaagttttttcctacagagtttaaaatggacatttttcaagacatgcctagagaacacactttgtatttagagaagaaattgattgatacacataagttttgtcataagtatatgatgttaattgatctagcatttttgttttaaaatgtattcttttatcatttattaaatggaatgtcccatttaatatcaacaatcaacacgtaagtccatttgaaaaacagtatacatagagtgaatggaaaaccacttcaagccaactaatacattctttttttgatatgaagtggtgaaatgtgaatcaacatatatatgtagacaagccataggtatatattcttactaaatacagattggaattcagatgaaatgaaaacagtatattttagtatttaagaggattcaggatcttgtttcctcggccaggcgcggtgactcacgcctgtacagaatcccagcagtgggaggccgaggtgggtggatcatgaggtcagaagatcgagaccatcctggctaacacgatgaaaccccgtctctactaaaaaaaaaaaaaaaaaagctaggagtggtggctgacacctgtagtcccagttactctcaaggctgaggcaggagaatggcgtgaacccgggaggcggagtttgcagtgagctgagatcgcgccactgcactccagcctgggcacagagcgagactccgtctcaaaaaaataaataaataaaaaaaaaataaaaaataaaaaaaaaatcttgtttccttaaaaatttaacttaacaatgaaagttaaagtacaaaagacaaatgtacggcctcaaatgaaatatctactgatttctcaattaaatttttaaaaagtggaaatagtgtaatattggaaatgaataaaccctatgtccagctaccccattaactagttgtgcaaacttacacaaatccacttgtttctcagggtctcagggttttttgtttaatctgtatgatgtagcacacactttattatttgtagcagataaactctaaagccatctcttactctaaaattttagaaccaccttgaaaacaggcatgcaattgtgtgtatctatgtggcctgagttttgtagacgtaaattgtgtatttcgccataactaaattattgtgaaatctcttaaagtattataaaaactaaagccctatagaatttatttacaatcaaccattttagcgccacctgatattgttaattccacatgtaggaaagaaccacaaacatggtatcactttaaatccataaagattattaattgtataatagcatagacatgtggaagaaaaatttacatattataggagaggaggctaggtatccagactctagctacatttcttttaagtcattttatgaagtaaaatataattataagtattttacccagggagagagctaatgaagccaaggtcgctggttcaattcccttgtgagccattagcttcatttcattccattgtcataggcttgctaccctcttaaccccgactcatcatccttcatattcatactattggttgcaaaggaaatttggccagactgtttgaatgtgtaagcaaaaatctattccctctgctagaaaaataacgcaaagttcaagccttagtgatatgacatcatccaagtatggacagaacagattatcattatgattgttattattactattattattatcatcactattatgttggcagtatagcatcatggttaaaagagcaggctctgaaatcagactgcctatatttgaatctcagtcctcctacttattatctcaatgacttggacaagttatttatctctctgagccttgtttttcttattttcaaaataggtattataatagcaccttatagagttttgtgaggaatgaatgggttaacatctgtagaaaatgcctgacagctattaagtaactattattattttttagttgtctggattatgtggactattcagcacttgctaaaaagcatatgtattcattttccagggctgcagtaacaaaatatcacatactgggtggcttgaaacaacagaaatttattctctcacaggtctggatataagaagttgcaaaccagtttgtattctggaccagactcccttccaaagctctgtagaagaaccctttcttgcctcttccaacttctggtagccctaggaaatccttggcttgtgacagcataactccaatttctgtttctgtttttacatggccatcacctccctgtgtgtatccatgtgtctataaaatttctctctcttttttcttccaaagacatcagcattgaatttatggtgctgcctaatccagtatgacctcatcttaacttgattacatctgcaaaaaccctatcttccaataaggtcgtgttcacagggaccaggggcttgggcttgaaaatatctttttgaaagatacagttcaacccactacagcagacaaagcagaaataaaagaggcattaaacacctgagaagagatggtaaagcagggaggtgtagaagatctgatgcaagcacatatttaggagaaatagataaatagcctcaaaaagtcactaagttttacctgtaattacaatagagcaacacctttcaatgtgggtcaggcagaaacctgcaaacgtatcttcgggctatgaataagaaacaggatgagtcaagcagatttcttctacctaggtggcagtaaaatgctctgaggatcctgatataattttggtcaaattatttaacacaatcctgcaaatggcacctacccacccatgccacaccacctttgcatcgtcaaatcagagattgtgacatattgagacaaatactgtgggccttacactggagatgaggtatccttgatcatctaataaacccaaattaggtaatgatctgaggccagtgtttgccctgtgtcctggatgcctctgggatggtcgtgtgttgcactacatgtttaagcaagtatctcagtctaagctattgtccactcatagactgactgtgtctgtttatggcatttccttacacaggtagttctgaaccaagcaaaggaagcctgatggtcttctgcccaaaactggttaaaaaaaaatggtggctttactctatagtcaatttaataaatgacttggaaagtcctcctcatatcacatcagcatgtcagtttttgccttctgcaaagtaatattcggtttccactgtattgactcaagtaaatatgttcacactatggcaaaatacagctcactgtagcaaaactctcagcgggagaatgttgtacactttggtcacagttacaatttaatttaggggtttatctgtctgcagtgagattatgggaaagaagcataggtatcggaagaaaatgttgatgagggattctgatatttgaaaatggatgagtttccaaaaagaagagcataaaactctctggatcaaattcagatagaaagctggcaggttgcctgatttgtaattgcatcttgaattgagctgtaatcctcaccacttctgaaaacaataagaataagaaaatgataaaccacatttgttttcaatagcaatatttgttcagcattcctaataaaatatttccctgatgttttggtttatgctggcaagtcacaaaattaatgatatgtgttgtgtaaggagggaaaataaaataatgtattttctagggaggaaaagaaaacagtattttgtagaggggtggaaggaaatcctgtattttgtgaagaaaaaaagaaattatttgttagattttctgtaaagtagaaattcatatactttttttaacaaaacaacattttaggtttacaacctatgaatatatgctcttcgtacacaacagtgtgggttttacaccgagccgagaagtgactgtgacaacgttagctggtcttccagagagaggagccaatctcactgcgagtgtccttaaccacacagccatcgacgtgaggtgggctaaaccaagtaagtaagcttctcatacctgtgttaacactttgtgtatttttaaaagcatattctttctttactatgaacctcccccatgtacacatcattttgatagtgaagtgttactggtaaatttttaccaattgcagattgacagggctgtcattgaaaactttagaagggccatttttattagtacccaaataaattagaaatggacacattaaaactaaaaccctggggcccctgtgccattcttaagatgcaaactctctcctactttgacattgttcttgggcctcctgctctccctctgtcatttcctttgcatgaacaacgtaatttctatcataccaggcaattgtgatagacatgtccatgtattaattggatacaatgtactattgttcaccttccttcagagagctctgccctaatatcttgtaactcgtcgctcattagcaagaaccatttaattggattgcaataatggaacagattcttcccagtggatcatcttcagactggctatgggcagaattccagcttgatccagtaaaaggaagcctagacatcaccactggatccacttaaataatgcagggtcgaccctggacctgctgggaacacttttttaacaggcatttggaagagttcacagagtaatctaatctgttcctgcaacgttagaaaccacagtaactgaaatttcacagttacttggtcagtagggtagtattaacatgttaatttgttgtgatctgttaatttgtgtcaatccctgacgactatcaggaaaaaaaccctgaatctaccatgagaatatgtattaaaatcagtcttataggtataacttgagatctggcaaatagtttcatcaaaacttgtcagaataacaccaaatattgagaaatacctgatcaggaaagacccactcaaaacattttatttatgaaagaacactctgctcactggggtaatcatctattgatgatataaaaagatgaaaagtcactactggttgggcaatgtaaccatgtgattttggttacactggatcagccttgaatttggttacagcttaagaagagagatgctccatttaggacacctgagtgatatcaattgtgaattaaagccagaattgaggatatcaattgtgaattaaagccagaattgaggatatcaattataaattaaatcagtaggttaggtttatctgtgtttccacaaaataatccatctttacaaaagaaaactgtctttctctggtttttataaggctgcaggtttctaatgatctgtgacacttgtattgggatctcttaaaccattttaatggaataatataagttaattgatgcttatggctaccctctgaaacacctctgggaaaaatacaaagtttttatctggggatgtgttttaaggcatatttccattcatctccctcttgctctctactccacctcactaactgattcatcttaaaagcctactcataaaggtaggctctcccccctcatctgacatttgaatacttctgttaagatccggctggtgaatttccaccaatataggtcctttatgttataattgcattcctgaagtaactgtgcttataaaaactgacaaacctaatagatctgaagcagctcactgaagtttcattaccttggtaatctgaacctctgaccttcgggatgtaggtaatgcaatctgctgttatttccattcataccttggaaatttttcagataactatttgtgagcacaaaggttaactctcagaagagggtcagtcttgcgaaagcttgttgcattatcattttcttcttttgggcaacttgctatcttaagtaaattaactagtcgatcctctgtgaaaggtggcctattttttgcaattttaattttaaattgttgtcttgattggataggaaaaacatggcatacagtctaatatgctcaaaggcaacaaactatagattgaaaatactttgcagtggaaaatcatgttttaaatttataaatatttgcttattaaaaatcaccttccaatgtatatatatatattttaaagcatggtctttgtctattatgaccctccccatgtacacatcattttggtagcaaaatgtttctggtaaatttttatcaatcacagattgatatgtataagttattaaaaacttttgaagggccagttttaaacattagtatcacatacatgatatgtgagataaaagcgtccctgtgttacttcagttcatttttggaaggcagatgttgcaaattggcaacacagtggccatatttccttcctcctccagcttccatacactgttttgcccacagtatttgaaaaaataatatttgcaaacatttaagaattatacataaagataatttgaggattcacttgacaagtcaaatgatggggtgaaacaatacccacatttctggaaggaaactatcagctggaactggcttcccctttagacagatcatgccctaaaaatctgacccggtccccattttcctggtcccaatagacaggtgatgtttatccctgctttatatgataatacaaaatattttgccctaaacaaaatacaccaaagataaattatattgtaattttgaaaaatcacagtttttgtatttgaaaaatacctcacttaaattatttatacaatcctcagaaaagcacaatgagatagaaaccagcccatagtaacttaccaaaaattatagaaagtaccagttcccaaactcaaacttaggactcaggcatcaaattttctatttctcatgcgtttagacttaacagtcattaacactttaacaagaaggatttaaaaggatccttctcatcttgactgctcagtctaaaatagaaggcaaaataagaaaatgcctaccaaagggagtacagtggagagatagtgcctcctttgaagctgattcactaaggaagtcagttgtggccagaaaagagcagtaaaacactggagggagtgagagggcaatgctttgtaaaagaggaaatgaaaaatcatcaaaatattgtctactttactgtctgtcaagagctcaccccaaccttcagatgttcatatcttgtatcatataatcctcctggtcttgctctctccttcctctttttttccatcttccttctttctctatttccttttttaaaatgtttttgtagagacaggttctccctatgcttaggttagtctcgaattaatgggctcaagtgatcctctctccttggcctcctaaagtgctggaattacagccataagggaccatgcctggccatttgtctatttctcttcttctaccctctctctctctctctctttcttcctattttccttccttcctcacagatacatttatcactttctctgtcctgagcactcagtgaactctggaaaatgcataaagtatgagggtatcatcattaagagggcaagtttaaaaccacagaaaaagcatttgtctcatcctgatctcttaatcagaaactaccaggtttgatagctagaagtatatctgactttgcctgaatttatctgattaaggtggcaatatctgtaaataattccaaatctcatctcttctaaaaagcacctaccattgttgcctcaccttgttcctctgttctcttttccatcactttagttatcaaatagaagagaccacatctgacttttccattgtcttccttctcagtcacttgtgcacctgttgtaatctgtctctcttcacttgtactctacatggttttcttaaagtcattagttatcacctaatgacccatttcaaaactctcttctcaatgccatcctactgtgttcctcttgtatccagcactgtgaatgatcccttactgactataattcttccccaataatcattactcccctcttctcaccaactacttcttctcatccctaaagatgtttctcaaagttctttcctgagtcttcctatcatactcctgttctcttgttggtgattccatctatactcaaggtttcaaattcttctaattacaaaaatgacaaccgccaacattgtatgcagccatatgaataaatagttttaaaatagactttgggatcagggatacttaaatttgaatcccagttccaatatgttttggcactacgacctagaatttaacctgagttccagttttctaatcagaaatatgaagataataactgccctgaaatctgttaaggactaaatgaaataatatatgtttaacaattagtaatcacctagtatttgtaatacagagtattattctatttctaaaatgtgcatggtcctttcaataccattttatataatatataaaaggggaagccatgtctagtaaaagcttggaagttgattttgcaagactattcagataaaagcattttttttattattattatactttaagttctagggtacatctgcacaacgtgcaggtttgttacatatgtaaacatgtgccatgttggtgtgctgcacccattaactcgtcatttacattaggtatatctcctaatgctatccctccccactccccccaccccacgacaggccccggtgtgtgatgttccccttcctgtgtcctagtgttctcattgttcaattcccaactatgagtgagaacatgcggtgtttggttttttgtccttgctatagtttgctgagaatgatggtttccagcttcatccatgtccctacaaaggagataaaagcatttctacagtgagttgaagatgcataaagaatatatgttattttataattacctgacttggctaaaagatagaaatttaaaaatctagttaaaatgttgaaaacttagtctgggttccatggctcatgcctgtaatcccagcactttgggaggccgaggtgggcggataatgaggtcaggagatcgagaccatcctggccaacatggtgaaactccgtctctactaaaaatacaaaaattggccaggtgtggtggtgcatgcctgtagtcccagctagtcgggagactgaggcaggagactcgcttgtacccgggaggcggaggttgcagtgagccgagatcgtgccactgcactccagcctggtgacagagtgagactctgtctcaaaaaaaaaaaaaaaaaaaagcgaaaactactaactattgcatggcatccattctcctctttttcttttagtgatagccttgccccttatctagaaactgcatttactaacctcccttgcaattagtcatggccaggtgaaataccagtagtatgtgtttgtgtcaatagaaagtgaaagacaatctgcatctttttgggtattaaccagaaaacactgggtgtgtgcctacttgttctcttttagcccttcccctggactggaatgaggacatgatcatgttctcaggttcaactatgcagtcgtgtacaacacccaaagagatccaaaatccccataagagaaagttcctgggttcttaagtgaccacatggagcacagtctgttttgatcactttgaagctattacatgagatacaaattaacatggattttatttaaactattatattttggagattttaggtttcaccagcttcgctaactaactcattccctgtttgcccatatcaatttaccttaaaagtagaaattagctatcctgttttttaactaaatataaaatgatgaataattaatatatctattatactatctcctttaaatacagttttctctggcaggcccctgatagaagctggaacactatgagagactaaagtagctctggagtttccaaagtgcaggtgtttggttttgacagatgggtaaactagagacaagacaggagatatgctgctcggaaaactaaggaggctgacttgaaggattattgcccaagaagttaatctttccacttcatgtcagcagtagtaccctcaggcagagtaaagaattttctcaagagcagttttgacaagctcaaattttccaagagctgcttagttggtgacgcagagccctgcaccatagaacttggaaaattggactctaatttggagattctgcgagcaagatcaagacttccatcataaaatcagcttaataaggtccttccaggtttttacatttgagcaacattacctcccaaaatgagcctgctaatgtgagatgtctgaagaatttagtcctagacaaataaattaagagatctaataaatgaaatgatttactataattgatctgaatcagtacaacaaactttttttgtaaagtgtcaaatatgtataatgttagactttgaagcccatacagtctctgtcttaactcaaatttgccactggagcacataaacagcaataaggtgattctgatttttaaataagcatggccatgttccaataaaactttattttggacattgagatttgattttcatatattaggttggcacaaaagtaattgtggttttcgccattgaagtaatggcaaaaaccacaactactttgcgccaacctaataattctcacatgtcatgaaatactttttttcttttgtttttttcccccaatcaaataaatgtacaaaccattcttagcttgcagggggtgggccacactaggccaacaggccagatttagctcatggaacatagcttgctgacctctaatgtagatgttaaaaatctagaagacataattgacattgataattgtcttggtctgtttgtgttgttataacagaatacctgaggctgggaagtcaataaggaaaagagttttgcttagctcatgattctgcagactgtacaagaagcatggctgtagtatttacttggtttctggtgagggcttttgtgatgcattaaacatgacagagaaggtcaaaaggtgagtggacatgtgcaaagatgcaaaatccaagggatgcccggctttctaaaaacccactcttgagggaactaattcatttcttcaaaaactaacccagccttgccagagcaagacaccaagccattcatgagaatctggccccatgcaacaaacacctccaactaggcctcatcttccaaaactagtacactggaggtcacatgaggtttggtggtgatataaacccttgatccccctttgctgggaaccatggcaataatttaaggccatgtaagaagcacaatctacttgctgttgcaggataacttttaactagcccgtctgttatggactaaagccctaattctcagtgtagctgtatttggagacggggcctctaaagaaatacagtcatcccttggtatatgcaggcgattggttccaggactgccccctaagtacaccaaagctgtgcatactcaagtccagcagtcagccgtgcagaatccatgtatatgaaaagttggccttctacacgagttttgcatgggagaatactactttattttttttggagatggagtctcattctgtcactcaggctggagtgcagtggtgtgatctcggctcactgcaacctccacctcctgtgttcaagcaattctcctgcctcagcctcccaagtagctgggactacaggcacatcccaccacgcctggctgattttttgtatttttagtagagacggggtttcactgtgttagccaggaaggtctcaatctcctgacttcgtgatcctcccgcctcggccttccaaagtgctgggattacaggctagagccaccatgccagctgagaatactatattttcaattcttgtttggttgaaaaaagtccctttataaatggacccaagcagttcacacctgtgttattgtgttgttcaagggtcaaccgtaattaaggttaaatgagattataagagtgggacctcgatttcataagttagcacacaggctcgcttgctctttctctctgtctctcccccaaccccttctctccctttctccgatcacagaggaaaagcatgggaaaactcagcagctagaaagtagctctccaaaagccagggaaagagccctcagcagaaactaaatttgctggcgccttgatcacgaacctctagcctccagattgtgagaaataagtttctgttgttcaagccacccagcctttaatattttgttaaggcagcccgagcaaactaatacatatctaactactgttaaaattatttaggaattcattataaaggagaggagcctgttctatatttgagaatttgctccagctaagataaaatttctgaccaaggattggaggttgcaactaaaaataacatttaatagcaaagctcttatccaaaaaggttacaacctttttcagctcactgagattgtaatagtctgttctcacattgctataaagaaatatgcaagactgagtaatttataaaggaaaaaggtttaattgacccacagttctgcatggctggaaaggcctcaggaaacttacgatcatggcagaaggtgaagagacgacatgcgagataggtgagagagagaatgcacacataggaggaactgtcaaacacttatgaaaccatcagatcttgcgagaactcactatcatgagaacagcgtgggggaaaccacccccgtaatccaatcacctcccaccaggtcctgcccttgacacatgggtattatggagattacaatttaagatgagatttgggtggggacatgggacctaaccatatcagagattaacttgatattcccacaagtagggcaatacctgctcagataaatttatgtggtccacaaaatatgcatcatacataataggattagaatatctgagaaaatatatcccaatatacacatatttaacataatctcacaggaaatcccgatttctttctattgcatcaaatacaagcaagtacaagccttaactccatattgtataactgtaactcaaacattcacattgtagtttttaagttcacctagttgccacagaaacacttgaaagataacaaaatcctaagctccaacaaccatctgagtggatccccacttggccaaggggacaccagagcaaccttgaaaactgagttcttggctacagtgggatgggaagtcagacacccctccctggctatacaccattagggttacttccctaagtgctaagcagaaaccaccctttcaaaagattccaccactgatatcaaccaaccacctgatgctgcccctcttctactaactgatgagagacctctggccacagagttgtcatggccagtgtatggagaatctgcagtcagggtcttcatgtcctcttcttcactgcttgatgtcagagggctgaaaactccaccctcagattgtgctaatgctgccatttttgtacgtgggatgcaccaggggatgtaaaactcaattgcacatgtgcgtgtttctcctttcataaatactcatgactcttcctgaggcttattgaatatgtatattcagtcaccccactcagcataaattcctgttgctcctcccttgaagaatcttttctggcttctggcttaaggctaccatatgcttcccaggctgtctgaatggccatcctgcaggctgcaaccctttatgagaagtaaagctctccttttcaaatttatgaacctcttctgttgacacacttcaaactcaagaagtctcaaatgaaacaagtttcaaaatctcatcccataattccatgttttctatcttatttaatgggattcacccagaaactaaaaccaaaaatctaagctatagctgtatctcttccttatccctttttaatttgtttatttacttatttgtacacgaataagttctttagtggtgatttttcagattttggtgcacccatcacccaagcagtatacactgtacccaatggttagtcttgtatccgttgcctcccttccacccactcccccgagtgcccaaagtccattgtatcattcttatgcctttgcatccttacagtttagctctcacttatgagtgagaacatatgatgtttggtttttcattcctgagttacttcacttagaataatggtctccagttccatcaaggtttctgcaaatgccattattttgttcctttgaatggctgatacacacacacacacacacacacacacacacacacacacacacacaccaaatttttttatccactcattgattgatgggcgtttgggctggttccatgttttcacaattgtgaactgtgctgctataaacatgcatgtgtaagtatcttttcatataatgacttcttttcctcttggtagatacccaggagtaggattgatgaatcaaatggtaaatctacttttagttctttaaggaatctccacactatttttcatagtggttgtactagtttacgttcccaccaagtgtaaaaatgtgttctttgtatcacatctatgccaaggtctattattttttggttttttgattatggccattcttgcaggagtaagatggtaccatattgtggttttcatttgcatttccctgatcattagtgatgttgagtatttttcatatgttttttggccatttgcacgtttcttggccattcttcttttgagaattgtctattaatgtctttagcccactttttgacttgattgtttgtatttttcttgctaatttgtttgagttgcttgtagattctggatattagtcctttgtcagaagtaaagatttttaagactgtctcccactctgtgggttgtctatttactctgctggttatttcttttgctgtgcagaagctttttagtttaattaagttccaactatttatctttctttttgttgcatttgcttttaggttctttgtcacaaagtctttgcctaaactaatgtctagaaggatttttccaatgttatcttctagaatttttgtggtttcaggttttagatttaagtctttgttccatcttgagttgatttttgtacaaggtgagagatgaggatctagtttcattcttctacatgtggcttgcaaattatgccagcaccatttgttgaataggttgtcctttacccactttatgtttttgtttcttttgtcaaagatcagttggctgtaaatatttggctttatttctgagttctctattttgtttcattggtctatatgcctatttttataccagtaccatactgtttttgtgactatggccttttagtatagtttgaggtcaggtgatgtgttacctccagatttgtccttttagcatagtcttgctttggctatgtgagttcttttttgattacatatgaattttaggatttttttcaagttctgtgaagaatgatggtggtattttgatgggaattgcattgatgggaattgtgttgatggtaatttgatgggaattgcattgaatttgcagattgcttttggcagtatgatcattttcacaatattgattctacccatccatgtatatgggatttgttttcatttgtgtcatctatggtttctttcagcagcattttatagttttccttatagaggtctttcacctccttggttaggtagattcctaagtattttactttttatttttgcagttattgtaaaaggggttaagttattgatttgattctcagcttggtagctctttgtgtataacagtgctactgatttgtgtacattaattttgtatcccaaaactttgctgaatttatttaacagttttagagggtttttggatgactctttagtcatccaaatgtctctagggttttctgggtacacaatcatgtcatcagaaaacagcaacagttggacttcctctttagctatttggatgccctatatttttttctcttgtctgattgctttggctaggatttacatactattgatataggagttaaaaagaaattaggcagatagggatggtaagagagtcctcaataaggttttccttttaatggagagcagcagcccccaaattatctcttttctgacaaagagcagcctgttaaattgaactgcagacatagataagcaagctggaagcttgcatggatgaatgccagcagctgcaccaacagaaaaaggctacctgggggcaaggcatgttcaacatagtggctccatctgcccttttctttgtcgagcacatgtacagtaagaaacagacaacatggcactggccaggtagagaacccatctgcataacaaaagattaggatggggtgaccaggttattcatgcactatgtaaatggcacacacagtcccatcaatctttaggccctatgtaaatcaggcactgcctcctcaagccagtctataaagctccgtgcactttgccgtggactggaagacccatttgggagcccttctttctctgcagaagagagagctattctcttttctctttcttttgcctattaaacctccactctgaaacttactgtgtgcctgcatccttgatttccctggcatgagatgatgaaccatggatatttaccccagacaatgatgctgcttcagtatgttgaataaaagtggtgaaagtaggcatacttgtcttgttccagttctcagggggaatgcttttgatatggtttggctgtatccccacccaaatctcatcctgaattgtagctcccataatgcccacatgttgtgggagggacccagtgggagataattgaatcatagggtgggtctttcctatgctattctcatgatagtgaataagtctaatgagatctgatggttttataaaggggagtttccctgcacaaactctcttttcttgtctaccgccatgtaagatgtgcctttcaccttccaccatgattgtgaggcctcccaagccatgtggaactatgagcccagtaagcctttcttttgtaaattgcccaatctccagtatgtctttatcagcagcatgagaacagactaatacagtaagttggcaccagtaaagtggtatgctgctgaaaagatagccaaaaatgtggaaacaactttggaattgggtaacaggcagaggttggaacagtttggaggattcagaagaagacaggaaaatgtgggaaagtttggaactccctaaagatttgttgaatggctttgaccaaaatgctaataatgatgtggacaatgaaatccagtctgaggtggtctcagatggagatgaggaatttgttgggaactggaacaaaggtgactcttgttatgttttagcaaagagactggcagcattttgcccctgccctagagatttgtggaactatgaacttgagagagattatttagggtatctggcagaaaaaatttctaagtagcaaaacattcaagaggtgacttgggtgctgttaaaggcattcagttttataagggaagcagagcataaaagttcagaaaatttgcagcctgacaatgtgatagcaaagaaagtcccattttctgaaaagaaattcaagacagctgcagaaatttacataatttacctaagtaatgaggagccaaatgttaatccccaagacaatggggaaaatgtctccagggcatgtcagaggtcttcatgacagctgcgaccaacacaggcccagaggcctaggaggaaaaagtggtatcaagggccagacccagggttcccatgctgtgtgcagcctaaggacttggtgccctgtttctcagtggctccagccatggctgaaaggccccaatgtagagcttgggccacggcttcagagggtgcaacccccaagacctggcagcttccacatgatgttgagcctaccagtgcacagaagtcaagatttgaggtttgggaacctccacctagattttaaagtatgtatggaaacacctggatatccagatagaagtttgctgcaggggcaggcactcatggaaaacctatgttggggcagcacaaaagggaaaaggggtgggtgcctccacactgagtcctcattggggcactgcctagtgctactgtaagaagagggccactgtcctctagaccccagaatagtagatccaccaacagcttgcactgtgcacctggaaaagcacagacaatgccaacctgtgaaagcagccaggagggaagctgtaccctgtaaagccacaggtgcagagctgcccaagaccatgggaacccacctcttgcatcagcatgagctggatgtgagacatggattcaaaagagatcattttggagctttaagatttgacttccctgcttgattttggacttgcgttggggcctgtagcccttttgttttggccaatttctcccatttggaacagctgtatttacccaatgcctgtacccccattgtttctaggaagtaactaacttgcttttgattttacaagctcataggcagcagggacttgccttgtctcagatgagactttggtctgtggacttttcagttaatgctgaaatgagttaagactgtgggagactgtggggaaggcatgactggctttgaaatgtaaagacatgagatctgggagggaccagggcagcatgatatggtttggctgtgtccccacctaaatctcatcttgaattttagctcccagaattcccatgtgttatgggagggacccagtgggagataattgaatcatgggggcgggtcttttccatgctattcttgtgatagtgaataagtctgatgagatctgatggttttataaaggggagtttccctgcacaagctctcatttcttgtctgccaccatgtgagatgtgcctttcaccttctgccatgattgtgaggcatccccagccatgcggaactgtgagtccattaaacctctttcttttgtaaattgcccaatctcaggtatgtctctatcagcagcatgagaacagactaatacagctttccacttttccccattcagtatgttagctgtgggtttatcatagatgacttttattacattaaagtatgtcctttctatgcctattttgctgagggttttaattataaagggatgctggattttgtcaaaggctttctctgcattgattgagatgatcatgtgatttttgttttcaattctgtttatggggtgtatcacatttattgacttgcatatgttaaaccatccctgcatccctggtatgaaacctacttgatcatggtgaattgtctttttgatatgctgttggatttggttatctagtattttgttaaggatttctgcatctatgttcatcagggatattggtctgtagttttcttttttgtcatgtcctttcctgtttttggtattagaatgatattggcttcaaagaatgatgtaaggagtgtttcttctttctatatcttttggaatagtgtcaatatgattggtacccattcttctttgaacatctgatagaattccgctgtgaatctgtctggtcctggactttttttgttggtaacgttataattaccatttcaatctcactgcttgttattggtctgttcagagtttctattacttcctggtttaatctaggagagttgtatatttccaggagtttatctaggttttctagtttatttgcataaaggtgttcacagtagccttgaatgatcttttgtatttctgtggtatcagttgtaatgtctcctgttttatttctaattgagcttttttggatcttctctcttcttttcttggttaatcttcctacatggtctgtcaattttatttatcttttccaagaacaggtctttatttcatttatcttttgtattgttttggttgtttgtttcaattgcatttagttctgctttgattttggttatttcttttcttctgctgggtttgggtttagtttgtacttgtttctctagttccttgaggtgtgaccttagattgtctatttgtggtctttctgagtttttgatataggcatttaagactatgaactttcctcttaacactgcttttgttatatccaagaagttttgataggttgtatcactattatcattcagttcaaataatttttaattttcttcttgatttcattgttgacccaatgatcattcaggagcagattatttaatttccatgtattggcatcattttgagtgttcttattggagttgatttccaattttattccactgtgatctgaaagagtacttgatatgattttaattttcttaaatttgttgagactcattttgtggcttatcatatggactatcttggagaatgttccatgtgctgatgaatagaatgtatattctgcagttttggggtagaatgttttacaaatatctgttaagtctatttgttctagggtatactctaagtccattgtttctttgttgactttctgtcttgatgacctgtctagtactgtcagtggagtattgaagtcccctgctattattatgttgccctttttaaactcctatgtgtcaattaaagacaggctttttccatctagtgaatccaccattccccagggccttagagtcctaccttagatgggaaaactagaccctcatagacggccaattgctccttcacatctcagtccagatgcatggggcccagaaaatgtagttcaatgatttgacaagaagagaaaaatgttggtattagggagttctagaaatctttgccttcagattacagaagatagcttttatcttccgactatattttaaaatttaaatggtattaatgatattaatggttactaatgtctttctctgttttttcatgccattctattttatatgtaataaagaacttaatatgctgttacttttcttgcctttctcatctgctgttttcaatgttcagtttattattattgttaatattgttgttatgatataatttttttatgcaactattttctctaaatagcttcagtacttatcagcaattcttaaactttcccaatcttgagttctggatcttgattaatctttctgtcttctgaagaagattattggatagttttatcatgaaacttaaaaagatcaattaattagttttatgttctctaaatgtttggtgatataagaaagtatttctctcatctttgcacattctcttaaatttgcccaaataagaaagtatgtctgttgtttttacacataagtaaccatttaaatgtgtataaaattcttggattaaactatttcccctcaaaacttgttgaaattgttccattgtctttcaacatttgacattccacataagaagtttgaagcttatctgatttttttctcctttataaatgttcctaatttttggtttacctttaaaatgtttcaatattccatgatatgtctatgtttggatatattgtgattattttggagaaaactgtattagtctattcagtttgtagacataagtcattttgggtaaggtttattggggcatttcatatccataattatttattgcatttatttttaaggtaattagactttttctgttctcgatgtctataatttttactttcactgatgtccttgtcattttcctgttaattctttgatattgtgcatttttaactctgctcatttctgctttcaacgtacgttttaattctgccattgctttacatggttccttgctctcctttcttatttaaggcagacccctttacatctctgtctttgtggctgtctttttatgattttacaaacctacttcatagaggcttctttttcataaagtaatgtcccttttttatttttggtacaccatgcaaatattttataaaacctccatcccattgtcatagaagtaatatacacaaaacttctgccttggaaggttctagacaagatttcccttgtcttatgctaggaagaagccttgtaacttatgtttttctatttaaaaaaggagagatacattcagacccagcttttctcaatagacagggagggtgaaatttacttgcctcttcattcagctgtttccatgttaatagccttcctctctcagaggtaaaatcaaggtcatcagcctttaattttgtgctggtctattgaactgaagatgtatcttctgtttcttagatggttcactgacttaggaagagtacatcaaagtttaaagaccttatttgagcaatgaaaaagatgcttctatgcatgtactgctcccagaacttctcatgtgataaccaggaacatgtataaaattgtatgtgtttctacatttttctatgttttggacttccaagtgtaacatccacatgagtggagaaacaagtgttgaagcaaatgttggaaacagggagaataggccagaaatccggtacttgttacccagaagtgctgcctgtttctgttctcaagagcctccatatcatgcagtaagacataaacaatggaacggaatcaccatcttttcctgttgtcctaggttctgttctgtttcagagggactggcatacggtgcatggctaagaaaggacatttaatggggtctcatccagacattgacatgtgatctttgctcatcttgaacttgtgctagtggaaatatatttaatgtatctacataggtatattaattggaacttgatagtgcagataacaggcacatttaataacccaagtgaaattaatttatatacgtaagtgaagtttgaaagcatttcattaatattatatctttagggcttgactttataatcagcctgctcacttaacaaactaaaattcaacataaactacaaatctagtacactttgcattataccatagcagccacaaattaatgagtaataaataatgctgtgagacagtagaaaatgatgctagtaacagaagaaacgtttgcactcactacacccatggctttgctgtacttgacgaatattatcattcaggaaaatgttaagggattttaatagtcagttcctgccgatgatcaataatgacctcattattgcatgtgcttacatttttgtgacatcagaggaaagaaacactgcaaaacccagaattttccaaattaattgctaaaggtcttccaatacaaactcttccaactacactggcacatcatacccttttaactatttctagagctaaagtgaaagcagtagtgtatttaggaaaaacaaaaagaaaaacctagtattcagtttttatgcaaaatcaccaagactttaatgtaaaggggtcctttaaagaaacatactattctcaaagctatattactttatatggccatatgctgggatctcacatataagtgaaattggacttcaatagccataaggagaaatgccactttttcctcccaatccttggactaatgctgtttaactttttttctttttttttttttcctgagacatggtctcattctgttgtccagcctggagtacagtggcacgatctcagctcaccacaacctctgcctcctgagctcaagccatcctactgcctcagcttcctgagtagctgggactacaggtgtgtgccatcacacctggttagtttttgtgtttcatgtagagatggggtattgccacgtttcccaggctggtctcgaactcctgagctcaagtgatctcagcctcataaagtactaggattacaggtgtcagccactgtgcccagcctgagcaatttttgatgcataatttgacatgaaatttcagaaggcttgtaagccaacactccacccccatcctaacaaactaaggtaatcgtttctgcttaaaagtctctgaaaataatactgatgtaagtagagcagcataatacttcctacctaagaaaatatggctgttttcatgttctcttgttaaagaatcattgtgggcagataatgagaagcagagcctaaggaaaagaatggataaattgggaggaagaggagaaaaaataatagactggtctttgaaaggataagggttgaagaattgatgagttatatttgcaagacagttagtgattgattttggtatcttttaaaggcttctctacattatagaaacacattgaactagaagagaaggatgagagccctgataaaaatttaagtattatcctgagccagtccttaaggggagcatgctatgtagccctgctacattgacaatgtatataaaaggatatctttctaagcatccttctaggtatcagttagcgaatgttgttagcaagttaaaaaaatgtctctaggatctgtgtcaggaaatgctcttatttgtattagcctagtcttctctctaagattatgttacttatgagcagaagttgttctatgtactgtatactttcattttcatcttagtttcctttcataagtgttatatcaaagttctgatgattcattgaataattataagtagcaaaattaaaatatttaaaggaaattaaaaagatgagacttttataagactcatattcctacataagactgcaattaattatgagattgggaaaaaacgcaaattattaaaaaataaaaactgaccaggtgcagttgttcatacctctaatcccaacagtctgggaggctgaggtgggtgaatcacttgaggccagaagtttgaggccatcctgggaaacatagcaagaccctgtgtctacaaaacactgataaaaattaactagtgtgatggcctgagcctgtagtcccagctacttggaaggctgaaacaggaggatcgcttgagcccaagacatcaaggctgcagtgagccaagattacactactgcactccagcctgagtgacagagcgagactctgtctcaaaaataaataaataaaataaaaactatcaccaccagcaccaccaaaaaggagatctcataagctttttttaacatttccaaaacaaaggctctctaaacttctttttttctcattctagaaagctaatgatagaattttttttttcccctgaaagcctcagctacattcaccatgtcctgcatttattgttgacagctgttcaagacctacaaggtgaagttgaatattacacacttttttggagttctgctacctcaaacgactctctaaaaatcttgccagatgtaaactctcatgtcattggccacctaaagccaaacacagagtattggatctttatctctgtcttcaatggagtccacagcatcaacagtgcaggacttcatgcaaccacttgcgatgggggtgagtccagattctaaaggatatttgcctcagagatgcgaatgaaattgattgattcttgccggggttgagatcagtcatccctccattataaaatttccggtgtgggagggaagggggtggaggctaaaatgcttaagtgctcactgtcatcagtagcagatcaataagcagtcccattgagacagaagcacaagctctaataatgagatattagcccagtttgttcctgttcttttcagtgtatacttattttagaactgagttcacatcaataaatggtgacatttagaaactttttttttaagatttgccctcagaagcagtacgtttttcaaaacgacagccaaacacagtgagagccctccctgagtcaccagaaatggtaggtggaagttcagccactgagaaaaattgcctgtgactcatttctaagccagttagcaagggggaggaagcaagggaagcaacttgtgaatctgaaatgtgtttggaatggtctttctaatcttttttggctttataaagtctcattataaacattataatatcattacctcccaagcaagtgttccaggtcattagcagagctctttaagtgtggaacccatttccctttgtggtgccaaaggtcggcaccttttgtttataaaatagggtagatcacaaggacaattcttcaactagttaagatgggttcttatgataaaaataggtctttgcatagttatttctgacatgcttgaataattatgcaatttaacgctaagcaagatttttttcttatgttagatttcatcattacctatggtaatcaacattcaaaatcatttacataatgacaatattgcattattgcttcatattgcttgagttacaagctagtaacatcaaatgatttttcacgttccaccagcctcattgtatttgagttttattttttgctcaaggagcaaattttatttccttccctccctcccctgcaccttggaggtatagagtgaaaggatggaaaaaagacaaaaaatagataagtgttagtggtgcagatgggtgaataatttatcatcatatcccactggtcacatagtattgaagattagcactatgctggtggtataaagcattttaccaccaattcttatggtttctaactgagagtataataagccaatttacagaggactacagactgtgataacttcatcagcgaaaagcagataagcgaggaaccctttgctaaacctaaatactaatctgcatttagcttaacatgtgctttttcagagacagctggagtttattcagtttcttcctttaattctagagcctcagggcatgcttcctccagaggttgtcatcatcaacagtacagctgtacgtgtcatctggacatctccttcaaacccaaatggtgttgtcactgagtattctatctatgtaaataataagctctacaagactggaatgaatgtgcctgggtcgtttattctgagagacctgtctcccttcactatctatgacattcaggttagaacattgttttttgatggttaggcttatggatatgttaaataaaacatgccaggctatgtcttcaagtggatatcttctgtcttggttacagattatttctttggtggggaagggaaaagagagaagggaaattgatcagaattaaatctgtgtgctgtaggcaaacatgtgagtctctggagagaagataatgataatatggaaaacgatggtgatgaggatggtgatgaaattctcactggcaaaataaagctaatcatgtattctaaataaatcttgttgagcagcttaccttttcccaggatcttttactgaaatcaaaatcagaatcagtttgtaaatgtggagatgtttttttctcttcccatttctcctatttactaatttaatatctccagagaagttatgaaacttcacttggtgtcaatttcctcttttgtaagcgcaatggactagatgtcttaaaacattctagccacctctagcattctgtgattctgaatgcaacaggaagacatatataaaaaatatagcagacaaaaaatattaaaaggttttatctgaaggtgaaagaaatatatttattcatcactcaaaaaatgttcaatgttctccgcatatgtgagagcaattgtggttaaaattttttgcccttggacttctttgagaatcttatgaagtcagtgtactctgccttagaaaaatatttatgcacttgtatgacaaaatttaacacataatttcagaaagtgcactgatcacttgaagtcaaattcatagacttcttcaggggctactggccttaaaagtagaaaaagtatagggaatactaaggcatataaaacaaggaacttatcttcacggaattggaaatcttgttggagtaccaagccataaaagataacaaggctaaatgtgcaaatgagtgataaaaaaaaatcagagtatttcagaaaccccacatttagagaaagcttgcaatttacaaaattttttaataaactatgctacttctaaaattcataagagcttcgtaagataattttcagaagatattaagcacagaaattttatatgaccacagaaactttttactggttctatccatttaatagtactacctcattcaggtttccatctccttttcctgacatttgaggttaagacatataatcatctggctacaaccaacactttagtctcccctactctgactcatagacctagcttcctaagaaaaccaaataaaaatatctttgaataaagaagaaaggtacattaattatttttctttttttttcatttaaatgtattttattttaagttcctgtatacgtgttcaggacatgtaggtttgttacctaggtaaacgtatgccatggtggtttgctgcacctaacaacccatctaccaggtatttacctgtacatgtattattagctatttattctgatgatctccctcccctgatgcccccccaacaggccccagtgtgtgttgttcccctcgctgtgtccatgtgttctcactgtacagctcctacttataagtgagaacatgtgatgtttgtttttctgttcctgtgttagtttgctgaggataaaatggcttccagctccatctatgtccctgtaaaggacatgatctcattcctttttatggctgcatggtattccatggtgtacatgtaccacattttctttatccagtctataattgatggacgtttgggttgattccatgtcattgctattgttaatagtgctgcaatgaacatatatgtgcttgtatctttataatagaatgatttatatttctttgggtatatacccagtaatgggatggctgggtctaattgtgtttctggtcctaggtctttgaggacccaccacactgtctttcacaatggttgaactaatttacattcccaccaacagtgtaaaagcccttctatttctccacagcttcaccagcatctgttgttacttgacttttcaataatcaccattctgactggcatgaaatggtatctcactgtggttttgatgtgcatttctgtaatgatcagttatgttgagctccaggtgcccaccaccacaccaggttattcttttgtgtatattttcagtagagacagggtttcaccatgttgaccaggctggtatcaaactcctgacctcaggtgatccacctgcctaagcttcccacagtgctgggattacaggtgtgagccactgcacccagccaagtatctactttttgaataatccctttatatgtcccttttacaaagaaataataatttcatttttattcagttttacctctttttaatataaatatagtaagctttatatgtttgttggccgcataaattcttctttggagacgtgtctgttcatgtcctttgcccattttttttgatggggttgttttttcttgcaaatttgtttaagtttcttatagattctagatattaaacctttgtcagatggatagattgcaaaaattttctcccattctgtaggttgcctgttcactctgaggatagtttctgttgctatgcagaagctctttagtttaattagatcccatttgtcaatttttgcttttgttgcaattgtttttgatgtttttgtcatgaaatgtttgcctgtgcctatgtcctgaatggtattgcctgggttttcttctaggatttttatagttttgggttttacatttaagtctttaatccatcttgagttactttttgtataagatgtaaggaagggatccagtttcaattttctgcatatggctagccagtttttccagtaccatttattaaatagggaatcctttccccactgcttgtttttgtcaggtttgtcgaagatcagatagtggtaaatgtgcagtcttatttctgagatctctattccgttccattggtccatgtgtctgtttttgtaccagtaccatgctgttttggttactgtagccttgtagtatagcctaaagtcaggtagtgtgatgcctccacctttgttctttttgcttatgattgtcttggctatacaggctcttttttggttccatatgaactttaaagtagttttttctaattttgtgaagaatgtcattggtagtttaatgggaatatcattgaatctattaattactttgagcaatatggccattttcatgatatttattcttcctatccatgagcatggaatgtttttccatttgtgtcctctctgattttcttaagcagtggtttgttttcattgcacaccatgattcccatagcctacctgagttgtcttagcatggaatatgtggactgatgtttatgttcatgattcttatggtgagtccatgtatgcaggtagaccataggccaaattatgaaatagaaatcatgctccaaataaattagaaatatagctatataaaaaaggctaacacaggaaggtgatggaggatttgccgtattgtcttcttttgaccagtgttcgggaaagctgagttttcaaaggcaccttattcatttgctttaccaagactcgaaacacacaacctagaagtgagaacactgtgtgctgtgcatgcatgtgcagctcagctttctgactctggatcaagagttaacgtttaaaagtgtttaaggcctattctatggaaaaggctttatttataccactactggtttgagtcaggtataaataactcaagccagtaggtataaagcctcctcttctggtagcctgaggagagtggaaacagatgaaaatacaaaagatcaaagtagaatccaataatagaattttgttattagtgcctaagatattcttattactgattactatattttttgtgaagctttttgcagtccaggaatactgtacttgatatagctgttgcatttctggaaatttgaacatcaaatttcagtgattttcattacgatgtcaaaggtgatttagtttcatttaaaataagcatttgattggaatgcctaatactttagaattaaggctctctatgctaaccccatctgtaaaatagctattgattttaaagcacataacacactcaagtatctacttttttttttttttttttttttttttttttttgagacagagtctcactcttctcacccaggttggagtgcattggcacgatctcggctcactgcaacctctgcctcctggaatcaagagattctcgtgcctcagcctcccaagtacctaggattccaggtgcccaccaccacaccaggttattcttttgtgtgtattttcagtagagacagggtttcaccatgttgaccaggctggtatcaaactcctgacctcaggtgatccgcctgcctaagcttcccacagtgctggaattacaggtgtaagccactgcacctagccaagtatctactttttgaataatccctttatatgtcccttttacaaagaaataataatttcatttttattcagttttacctctttttagtataaatacagtaagctttatatttgtgtttcattcacatgttatacaatatcgttttagcactagaaataggtcccaaaatggagactgggaatgttaacattagtaagaataaaaacatattggcacatttctctaacatttgaggttaaaacatatataatcatctggctaccagcagtagtcattggtcattttcctttgaccaatgaatcaaaagaaatgttttctggagaaacatttgaatatacctaagtagtttagagcttaaagttatgtttaacatttagatgagaagccagtagggtacagtggagaacaactcagatatcccaaatcttaccagcttgacaatattccctggcttctctgcaaatttgtttaaatggagttatgaggaatcaatacgattatttgtgcatatatccattataatatttggcacatattagatacataataaattcagttgaattgattctgggttatctcattatgtatcacagaatcaaatttttccaatatgtataaagttcattttcattaattatattacagcattatattttaagttcatctgcctttatttcagatttaattggacatgctcagaatgtaggcccttgatagtgtttaaatatccactattaatacctcaaaagactatatggcatcaataagtaacacaactcatacagcattatgaacatatgcctcaactaacatttaggtaccctatgaataaaatagcatatctagtaaatacaagaatcccatttgcctttcctcaaccaccaaaggaacagagaactgtttcacataaaagctcggaattaatgtttaagattcatcagtacctagcttgccttctctatttatatattagatgcttaaagtaaattagcactgtaaaaagtacagtttctctttggtttatcctttaattgagagcagaatgatatcgctttgcagatgttcccaatcttttgcatattcatttctctctcctccctcttggttaacgtgttccttttgtgtgactaatgcttgatgaaccccatttctaatcttcagttattccaccctcctcggtttttattcagattaggtggcagaattaaagggatgaatgatgattttctgctgtgattaaggtaaaaatacaattgcatctggaacaaatggatataaaatacctcagccatattggaaggcttctctaggcctcatttttcctccattagacattagcatttaggctatttgttttacagtgtcaagacttccagaagataccatcattacactacttagttatagatttagagaacagtgagcagtgataacctgttatgcttgcaaactgtcacttgggcatcttccattccttgactatgctcttcagtagattaatgtatctttctctttgtgaatagttgcaaccagagagtaaacatcatcattcccattactaaatcaattatcttgatcccaattccgtaccttcctctgagctcattcctttggagtcagttaacatcaaaaatgaatattgattaaacctcaagaggctatagagaaatacaagagattcatgtgaaatgagggaaggtgggattcagactattgttagtaagtatttcaaaaatggttgcatttattttttctaaactaatgtttgcaggttgaagtctgcacaatatatgcctgcgtgaaaagcaatggaacccaaattaccactgtggaagacactccaagtgatataccaacacccacaattcgtggcatcacttcaaggtacaaaattttgtgtcagttaaatctaaggaactctgatcagaagaaatgaaaataaaaatcaaaggtatcctctcagccatgacaatctcatttaatgggttattataagtatgtgtgtaaatcaaatttttgatattatttcacagatattaatcttcactggacatccaatggcatttaatctttaatttccctgattgcccagcctcagatttcttatttagtaacctgtaagcaaatacttgaaatacatgtctccttatttgaatgtgtcctttagtgaatccttttgcggagcataatacaagcttaattgtaatgactaccttctaacttaatctttttgaaaaaaaattgatttatatacatcagagtgccctaaagctagaaatctgtaaaattagtagggcagataatgtttagataagcattaccaattttgtcagcttcttggtagaatcactttatttttctttattcttttgttgctgagaaatgaccatagtttgaaagcgagtctctttataattcataattagtaacaacaacaataataataatatttggtattgtttccaaagctgaaaataagatggtaaattgttcatccgtttgtatcaagttgaggctgggaaaagaaatcttagtgctttcacattatactttttgcttaagccaaatgaatcacccttctcttacatgtgcaaacaacacacacacacacacagacacatacacacactgaaataataagtctattattaatgtttcaattctgaaggatttctctatgacatgttgaaatttctggatcttaaatcagttcaaaaaattagtactggttttggcaaccaatggttaaaataattagaaaaattcaactaacctgactgttagctgttcgtggcaataatcatatcttgtctgcttgagtatatcttctatcaaacacatgatagatactgatctaatttttggcatactaattagtttataatccccccagcagatatcccccaacctattcacagtattatctactatgcagggaggaaatagtcatattaaatgggcgttagagacctttattctttagcaaacacatctgtggctataataatatagaaggcaaggtggggcgtggtggctcacgcctgtaatcccagcactttgggaggccgaggcgggcggatcacaagctcaggagatcgagaccatcctggctaacatggtgaaaccctgtctctactaaaaatacaaaaaattagcagggcgtggtggggggcacctgtagtcccagctactcgggaggctgaggcaggagcatggcgtgaacctgggaggcggaacttggagtgagccgagatcacgccactgcactccagcctgggcgacagagtgatactctgtctcaaaaaaaaatatatatatatatatatatatattatatatatatatataatatatattatatatatataatatatattatatatataatatatattatatatatatatataatatatatacacacacacatagaaggcaaaagtaatacaaaagagcataagacatgattctaaatttgcaaagttccagtccactggggaagatactcccctaaataaatgtttatagaacaatgtaaaaaacactataataagaggtttagatgtgcaagaacataaagagaaaaatagcaaactttacccagaattatcagtgaaggcatcatggaagatgtgacctttgacttcagtcttgaaaagctcaaggaagaattatagttaggtgggtggatgttttcaaattcttgtctgctggcatccccatgactcaagcccatgtgaatgacgtaacagaatatgcctcatagtacatatttatttataactaaaaataacgtctaagctttataagaaatggaacaaatgtgactgtgtctctaggttttttttcctttaagaagattattgcacataataacagaggacaaatatttttagttgctattaaaaattgcttgtatccaaatacattaaattgatgacagaaacattaaaaagagtattatacaacaagaacaaggaaagtgagagaggagacaacaacagaaaagagattgcaacacaattttgtaagcaatatttgtcagaaagaagcaaatgatttaatacagtggagaaatttacaaccaaaatattggttgacaaaagacaataatgacaggaaacaaactgttttttccacagagaactggagaggctgagcacttagaagttttaaggatgtaaagaggaggagagagggtagggtttaaagctgaaatcatggggtgagacacaactgttaacaaataagtgtttggaatcccaggtctcttgcatctttgctgtgcatccaggggtctatttctcttcctccacatgacaaagtccaccgaccaggagattagacatttattctctggagaaactgagggctactaggcagaggggagctgagatgagacacagaagtaaaaacagtgataaagtgagactacaacctgaatggtgggctttttggctaagtttcccagttctgccctcaaaagcaagtagacaagtcataaacacctccagataggaaactgaacatagttttctagaaaaaaaagaatgatctcaaaaaaaatacctccagataatagcatatagggatccctaacagtaaaaacaacttgtcctctggtcacccagtagggaagtatgccaatcaacaaggctcacctaactataaagcttttagtcagctttttttttttttttttttttttttggtgcatcactcttaaagataaaaaggggaccaaaataaacaaaagacatgatacaatagattcagagataatgcaggtgaggaaaaaaaattatagcctcagacagataaaagaaaattctctaaccataaaacaaaaccagcatacttaaaaaaataaataaataaccaacgaggagaaaacttcatggaaattaaaagggtgaaaagctgaattgaaacttttgaagaaagttcaagggaatgtctctgaaaatgcaatgaaacacaaagatttaaaagagagagagacaaagaaaaaacaatagagagtatccaggaagtctaatatttgaataataagagcttcaaaagagaatcaaaggaaaagagggagaaaatttaaaaaaaaaaaagacaagaaagtatcccagaaccaatgtactactgtgcagatcaaaagattccctggataccaacaatatgactaaaaagtgattacatataaagggatattatcaggaaattgcagagtaccatgtttaaaaagcacatccaaaaagctgccaggaagaacagacactaccacaatcaggatgtgaagcagcatcatgatgtcggtctccattattgctaacccctcttctacccttcctaaaactaagcaaacactgccatgttttgttatgtataattctgccttttccatattgtcatgtaaatggatcacataatatgtagccattcaaatggcttcttttagttagcataatgcatttaagatttgtccatcttattatatacatactagcagttgtatacatactagtagttgtcagtttttgttgctgagtaagattccattatatgaaagttctacagtttgtgcacagtttggataattttcagttctccgtgaccacgattaaagttgctgtaaaacatctatatacaggtttttgtgtgaagatatattttcatttcatgtgggtaaatacccaggagttggattgctgagtcataaactgccagactgatttacaaagtgactgtaacatctttcattcctactagcattgtatgagagttcaagttgctctacatttttgctagaacatgagatactatgaggtgttttcctcttattttttaaatagtcattttaatagatgtttgtggtgtgttattatggtcttaaattacattttccctaatgactaatgatactgataagctttgcaattgctttttgcatgcactttggcatttgtttactctgggaaatggtatctccaaatcttttgcaaatttcttaattagattctttgttttcttattttttgagttttgaaaattttttaaatatattttggatttgagtttttgtcacatatgtgatttacagatatttcttctctaccttatgatttgttttcaattatcttatttgtgtgtttttaagagaaagagttttaactttccaagagagttagatttgttactttttccttgacagtttgtgcatctggtattttatctaagaactttttgcctgagttaaggtcacagagactttctcttgtctatttcctagaacatttgtatgtttacatgttgaatttatgtctatgattggttttgtgttaatttttgtatacactgaggcatgagtcaaggttaattttttttggcatgtaagtatttaatagtatcaacaaaatttttggaaagattatcttttctttattgaatatttttagatttttgtcaaaaatcaatttaaacacgttttgtaggccatttttggactctcttttatgttcaatttatcaatatgtatatctataccaatatcgcacaatcttgattactacagctctatagtaagctgtcaaatcacattgtatgagtcctccaactttgacctttataaaaatcattttggcctttctcactactttgcctgtccatataaatttcagaaacaggtcattgatatctacaaaacatgtgattttgattagaactgcattgaatttgtggatcaattggtagagaattgacatcttaacaatatcaaatgttctgattcaagaacacactcttgctcatttatttgcatcttctttcctttattttatcagtgttttatataatccagtatgcaaatactgcacatattttattaagtttatacctaattacttatttggggggtgctattattattgtttctttaaaacaaattcaaatccaattgttgctagtgtgtagaaacacaattaattttggaatagtgagcttacatccagcaaacttgctaaactccttgtaagtcttaagagcttttttgtaattccctagtctatatagatcttctacaaagagaaactgtttatttttttcatttccaatcagtatgtcttttatttctttttcctgccttattgcactggatagtttaataacgtgataagagcatatccttgacttgttcccaatctttgaaagaaaactttcagtcttttacccttagatgtgatgttacgtatgaaatttttggccatgccttttatcacgttgaagaacttactttttatttttaatttgctgacaattttcattataaatggacatggaaatttgtcacatgcttttttgacattttaaatttgtactatgatcgattatatttactgattttaaattattgaactagtttgtattcgctggataaccagaacttcgttgtgacatattttcttcttcatatattgggggatgcaatatactattatcttatagaaaatgttcatctgtgttcataaaatatattggactgtgtttgattttcttgtaatacctttgcctggattgggtatcatggtaatttctggtctcatactaacttgggaagcatttccttcttttctattttgtggaagagattgtacaaaagtgttattatttcttaaatcttggtaaaattcaccagtgaaacccatatttgcctggagtttttctttgatggaaggttttttaacttggaattcaattcccttaataatgtatgatatttggcaatttattctccagtgagtttagtcatcttgtgggtgcagaaaataggttaatttaatcaaatttgtcaaatttattagcaggaagttgtttgtagtatgtttgtactacaaacaacaatttgttgcaattgattttattctttcatttctgatattggtagtaagtgcccccgtttttctgttcagcctagagttttatcaattttgtagatcttttcaaagaaccatttttggctttatttattttctatatcatctacattgttttctattttccatttcagtgatttctgctctctattgttttcttccctcttgccttgctattgcttctctagtttcttaaagatgaaaactttcattattgatttgagacctttcttcttttctctcagtcctgcttcggtatgaagctcacaaattttgaaatgttgcattgcacttcatttattcaaaatatattttaatttctcttgagacttctttaacccatggattatttacaagggtattgtttaatttccaagtatttggggatttttcagataagtttctatctgagtttccagtttaattctattatgatctaagaacataattttagaattccaattcttttaaattagttacagttttttcagggcccagaatatgatctatcttagtgaatggatgtgcacttgaggagaaggtacagtctgttgttgtcagatagagtgttttgtaaatgtcaattagatcaagttgagtgataatggtgttcagatcatctatatacttactgattttctgcctgcttgttttatcagttattgtgagaatggtgttgaagtctccaaatgtcattgtggctttatctatttcttcttcagatctattagtctttccttcatgtactttgatgttttattattaagtgcatacatgtttaggattgttaatgtcttgataaactggctcttgtatcattatgtgataagcccttttacttcctgataatttccttgttcttaagtttattttgtctaatattaatatagccactccagctttcaattgcttagtgtaattctgggtgatttttcgattgattccttcacattttgaatattacgttataaaaatctgactcctgttaaaatcctttgaagaaagttagagttcttatttacttttttcagcaggttaccaactggttagcttcagactccaaattctgttttcctttgccagtgactacagtcagttcctattttttcataaagtagcataacaaagctataaactttgctttactactctgtgtctgcacaatggctaatttgggatttggctgtagaattatgtaatagttctgatctcaaaatcttcgctgtgctgcttgcataggctatgcatgtgaggcaaccataaatgtgcagcttggagttgagtcaggacttgcgttcgttcattcataaaattagcttctagctttcttctctctgaaatgtcccccatctttccagctcctttggacttccttccctggatttttggctagaatgatatgatttcttttgaaatgtttgcctcccagcctgcctccaaatttgcataactggagttgttcttaggcaatgaggtaagaggaattcgagaaaaaaaaataacaaggacttcccccacattctttggactatagaggccccatttcctgatttctctggacagaaagatttttccccccgttggggctttagattccaatttggccacagctgccgcagtgcagctccttggctctgatcatcctcggagcagggcccagcagaaagaagacaaaacaaaacaaaaatgggggttttccctatactctctggcttgcaaggcattttgttctagatactctagccggaaaaaatttactttctctaggattttgcttccctagttcacagtttcacactgatactgcccttgggttaaagatgggaagtaaaggagggggaaaaaaaatgggaaactcaccctgtaacattcattcttaaagttttgtctcccctcctgatcagccttattgttagcttttcagagtcctcaggtagttactttatataatttttgcagatactgagttgtaatcagtgggagagataagctgtaatgggcttattccatattggcctgcatgggaagtccccctccaccacagttttctttcttccaatgcctttggcaactttccttttcccccccagtcagaagcctagcaaaaacttgatagaaatcattcataaccaaatattggcatgtaaaatctttcctttcttaaaatgatccatagtagcagagtaacattttccaaaggcaagactctaatgagcaactataggctgccaagccattaatcaaaattataccaacaccaaagcagttagccttgtgtgtgtatggtattgtttgtgtaatttcattatacttctggcaatgtatacttgttagttatgtttctattttggttttaaaaaatctttcatattagcaacatgcaaaatgaaatgtgaaatccttccagaaaaacatcagcagacggggtctacttctctagcatttaaaataatttggtttctaagaagccatacatttcttagattctttgtttatttttggtgaaattcagaagtcagtaaaatttaactcatatatttcaataacatacagatagcataccagcctgtttgattatatgcgtgcagtgtaccaactcatctttgtctttggccttaacttatgccttgtttttgactacatcttcagcagtacaagcccttatgcatgtttttcctcttatatataaaccaaagattccatagcacacaaataatatagaagaatcaaatggacccttctagttttataagctgctgcttcagagacaagccctgtttctacattgcattttccatacttctcatattatcatcagctccttctatatcccaaaagaatactaactactgatcgataacccggacatgtctggccatggcctacatgtgccctgggtagttcatttatttgtcttggtggatttgctagagtggaatttaatcaatagctaattcattaattctggtcctcgagaatgtagagactgacctggatgaagataacgggctgggtctggctttgatagaaatatgacaaacactgcagctgacagcttcactaggtactgtgctatgaagtttagttatttattccccataaatggagacactaagaaaataacacaaacaagaaagatgttttattacattactgttagtattccaaaatgcatcatttccaggcatgaggctcaagggaaagtagagaaagaactcagatcatgtcttttaatgtctttaattggaaccatggcagttttttcacatccaaatcagtttggggatgtgttattgataaggagtgtgaggtataaagtcttcgtagcactcacaaataattgttttaagatttgcttctagatgctgaatgagatcaatgatattcttatacacaaactttgcagaaatctttctgataacagcataggttagatgtctctaaatgaatgctaaaccactatcgttattaatgaatatctatatatttttttcttttttgttgttgttgttgagacaggatctcgttctgtcacccaagctggagtgcagctcactgcagccttgaccttccaggctcaagcaatacttcctcagcctcctgagtagctgggacaataggcatatgccaccacacccagctaatacatttttaaaattattttgtagagttggggtctcactgtgtcgcccaggctggtctttcgaactcctgggctcaagtcatcctcccgccttggcctcctaaattgctggtattacagatgtgacccacacagcacccggcatccccctatatttttaaattacttaatgtggggttaagtatggttcaagaggtcagagcttgtggagaaagaggattctccttttttcctcaccaaattttatgagacatgctatgatatactttttatgctatgacattagatatcagggaatctcttctatccttgattttttctgcctaacttttctcagtgaatgatagcttcaactgaagtaatgattttacagttttgtaaaattaaaagaaaaaattaatattttacatttaatttaattatttaacattacaagaaaaaattaaggccacatttctgtttgtttgctttaatagggagagtgttgggctgaaggatacagaatgtcaaatcacttgttttcacctgtataccaaacttgcttaccaatatgggcaattgtagactatttttaatatggactaaaactgtctgcttaaacctttaaaggatatgggtagaaccttgaaagagagaatttggactacactaagtgcaattcgtacagatccaatcaatagccttatggtcaccatggcttttaggaaatattactcatttgatggccatgagttctgattatcacattctgtttaaggagaccttaatagaatagtgtcagaatatagaatgtaaacagaaagacagaatatatagaaaagagaatattgggcttattattatggctctgctatcactattttcatttccttacctccctcttcttcccaaactcctcctaacttctttacctcttgtagctcccatagaaacagctcggtcgctgaagtagcctttgagtgcctttcagcaaaatccagttcttcctcctaattcactttagccctcaactgccactttgtccctggttctctaaacattcattgttttgttttgtttttattggttccattaaaaacccacttatgcattctgggtgtcctcaggaaaaagactccctaccttgctcaggtagttcagtcttgcaattttaagccatactgatgtctcaaagatctctggccctgttttcttcctaaactctaatcccacatacccacttgcctattgattttatgtcatgatattcacccatcacttccataaccatgagattcacaagttaattcttatctaactcatcatcttttccaacactcacttctgcaaatgtaccaccatcctgcatattatcgaggacatatatctttgaagtatttttaatcccctaagtttattaaacactgattttagtacattttctgttggagcatcttctcatatatgttactcttctccatttccaccactaccaccctggttcatgttttcatcgtttaagtttatataaccattttatggagctgtcttaatccaattagatacaaagagaaaaaaaaatcctttacttttcacctgctacttactgccttaaacacactgttttggctatccttccctcaattctcaaataccccacaggaacatcttatgggtttccaattatttttagttatgagtctcactttgataattaagattcatgatcaagtattaaaaagtccattccatcaccatcaaaatattagcctcgcatctagttcaaagattctatcatttctaaagctcaggcctaattgtagcttgctcttttcttccctcttactctttctttcctattccattttatccaaatatgttccctttcaattttattacttcactgccatcactgtttgacaatcacagctctccattggcaagtgatgctttcttgggcaattgtatgtttttcttgagaggtcctcatgagaatctttgaatagccaaattccctcacacgagtgttgccctttatagctgatcacttgtggtgccaaaagagcagaacattccaaagactcttcctgctggagtctcctcatgccagaaggccactgtcctgggccatgtaccttcaagttagctcaaacctagccatcttgcaaggcatccacttggctcttgagaaactcatccatctatgccatgctatagatcaatattgtggtattctaggcttaacctttcattgcagaactgctctggccaatctctggccactagaattctctaactgagaagtaagctttatttcctatgctcatacagactgccaaatttaagagttccctgtcaagctgtcccaagatctcttcaccacattttcctccaaggacaaaaggagggaaatgtgtgttcctttttattaaaagaacatgggttttgcattttgactttttacctactacaatttataataaacatctcagtaggataattaaatattcagtgacttgacttgaaagcaaagaattaaatttgtcatattacatttatttcatctttgttaaaagtgttctgatcatttttgataaccatgatctggaataatattgaagaacttgagtgttacataaatgattgacaaaaatgaccaaatcgattagaaaaaaagcctgtgtaaacataaccagataatctagagctatttaatccataacaatttaggttaatatcttagagtgtatgaagatttcttttctctggtcaaacaaaaatgttttgaaaaaattggggaaaaatattagaatgaaatgttaaagaatagtaatgtgaacctgtcttcataaaaatttgatctgacttgtatcattttgatattcacctgtgtaaaggtaagtgatatcaaattattttccctacactcctttgtatcttcaatggtattttgtacttcaagggacaactggaagtgatgagatctggggagggtgaaatgcatctgtaatcctaactagttgggaggctgagtcagaattgcttgaggccaggatttgagtccagcctgagcaacatagcaagatcccatctctaaaaataaataaagaagaaagtgatgacaactgtgggggtggcacaatagtatgtagtagtaacagtaataaaatagtaattctgctgacaatatgacataattaaaaagaaataactacaactagaatgtctgaacacttgatgaattcatgtaccaaaatatgtgtaaagaacttccagttccaaaatgatgacatagaagcaagctggcttcactcctctccacagaaaacagaaacaaatgtacagaactgagattatcacagcaatatcccagaactcaaatatgaggacaagacagttcccaaagtcacagagaagtgaaaatctccgagcagatggtaagaaaattggactttcatatccacaatgcccatctccccaatatattcagcaccacgcttgtggaaaatattttcctgacccttgatttctgcactggaaaagtgcgattgaagtggacagtttcccgaccgtcttaggttacctggcaggagacctttacctgcctcaacccacaggaagcatcaggagtgcccgaagggctctatctctgtgaggacatccagagacaatgtggggagatgggactaccatcaccagccctggaaattctgctctgtaactcagtaaaaggagatgccaaatcagagtggctgttcagcagcaccacactgtagtagttttgctccacaggtttcctgggcaccaatcctcagccagcctcctcacactaccaggatatcccctttggaacctcccctatttgggaaaggtggtattctgatagtttactggagacaaggcaaacctggacctgaggcaccatctagtgccaaaaaggaggcagtgacccagtgaattaaaaaaaatgaaagaaaatgaacagaaaaattacaaagaatctctatgcaaacatacctaagaaaaaccaaagcaagccagagaagactgcaataaataactaatccttcaatgcaaagacatagacatatatccataagaaatggagagaagagtaatatatgagaggatgctccaaaagaaaatatactaaagttgctgtttaataaattcagggaattaaaaataattcaaagatacatatccttgataatatgcaggacggtggtgtgtttgcagacatacaacttctttaaacagggaagtaggatcttctcaagctgacaaaagcaaggaaacagtgagtgaccctaacaagatggtgataggtgaactctatgaccaagaattcaaacagttttaaggaaactcatgatcaccaagatagtacataagataaattcagacatttctcaacagatttaacaaagagattaaaatggttcaagaaattaaaaaagaaatcttggatctgagaaatacatctgctgaagtgaaaaattcattagaggctctcaatagcaaactagatcagaggaaagcatcaacaaacttgagacaggctatttgaaaatacagagaggtggggataaaagaatgaaaacaagtgaagatcacctacaaggtatatagaaaactacctgaaaagacaaaatctaggaattattggtgttcaagaggaaggtaaacaagagcaagaggtagaaagctttttaaaagaaagattaacagaaaactttgtaaaatgtaagaaacagagaaatatccagatatagaaaggtcagagaagaccagatttgattaaaataagattattccaaggcatataacaatcaaattcttaaaggtcagtgacaaagagaggatcctaaaagcagcaagagaaaagaagcaaataacatatttaaaagcttcagtttgtttggcaacagtctactcaacagaaaccatacaagctaggaggaagtgggatgacattttcaaagtgctgaaataaaaaaacaaatgccatataaaagtactgcatacaataaagctatccttcaaatatgaaagagaaatgaagtccttcccagataaaaagctgaagtaatttaccactatgagacccatcttataagaaatactaaagagagttcttcaaactgcaagacataaaaaactaatgcacagaaagaaaacatttgaaagtaaacccactgataaattaagtacacagacaaacccagaatactctaatactgtaattgcagcatgcaatccactcatcacttcagtatgaagcccaaaagacaaatttatcaaaaacaatagtaggtacagcaacgtgttaagagatagacaacataaaaatatacaaattgagacgacataaagtcaaaatatggagaaatacagttaaattttagagttttttcattgtttctttgtttttggcaaccaagtacaataaccatatgatcatttcaatagatgctgaaaaagcatttgataaaattcaatatggctttattataaagtccctcaagaaactggatatagaaggtgcatacatcaaaataaaagccatgtatgacaaacctatggctaacattgtactgaactgggaaaaaatgaaagtctttcctggaagaactggaacaagacaaggatacccacttacacttttattcaacacaatactggaaatcctggtgaggcaatttgtcaagagaagaaataaagggcatccaaatcggaaagggataagtcaaattagccttgttaacagatgacatgctcttataattagaaaacctaaagactccaccaaaaaacctgttagaactgatgaacaaatttagtaaagttgcagaatacaaactcaatgtacagaaatcaatagcagttatatacaccaacagcaagcaatctgaaaagaaatcaagaaagtggtcccattaacaatagctacaaagaatataaaatacctaggaatcaatttaactaaaggagtaaaatatctatacaagtaaaactataaaatgctgatgaaagaaattgagtaagatacaaataaatggaaagatattccatgctcttggattagaagaattaatattattaaaatgacaattttacccaaagtaatttacagattcaatgtaatacatatcaaaagaccaattacattcttcacagaaatagaaaagtatttctaaaatttatatggaaccacaaaacacccagaatagctgaagcaatctgagtaaaaaaaagacaaagctggaggcattacactaccttacttcaaaatatagcacaaacctaaagaaaccaaatcaacatggtattggcataaaaacaaacacataaaccaatggaatagaatagagaacccagatataaatccatgcatttacagacaactcatttttaacaaaggaaccaagaacttgcaatgaggaaacagtctttttaataaatggcactgggaaaactagatatccatatgcagaagaatgatagaagagacagaagagatagacccctatctcttaccgcattcaagaatcaactcaaaatggattaaatacttaagtctgagacctgaaactgtaaaaccaatagaagaaagcattggggagatgctcccagacatgatctaggcaaaggcatttgtgtaagatctcaaaaacactggcaagagaagcaaaaacagaaaaatgggattacatcaggctaaaaagcttctgcacaacaaaggaaacaatcaacaaagtgaatagacatgccatagaatgggagaaaatacttgcaaactgtctatctgacaatgaattaataactgggatatataaatagcttaaacaactcaaaagcaaaaaacaaaaacaaaacatctgattaaaaatgggaaaatgatctgaataggcatttatattgcctattgcctattcagaagacatacaaatggccaacaggtatatgaaaaaatgttcatcatcactaaagagatgagaattgcaactcaaaaccataatgaaatattatgtcacccagataaaatggctttgataaaataaaaaagcaggaaataatggatgctggtgaagatgtggagaaaggggaactctatttacactgttggtgggaatgtaaatttgtacagccactatagaatattgtatgggggttcctcatgaaactaaaaattgaactactgtataatgtagcaattcactactgggtgtatatccaaaagaaaggaaaacaatatattgaaaagacacctgtactcccatgtttattgcagtgctgttcacagtagccaaaatatgaaatcaacctaagtgcccatcatgaatgaatggataaagaaaatgtggtacatatacacaatggactcttattcagccataaaaaagacttaactcctattatttacagcaacatggatggaactggaggtcattatgttaagtaaaataagtcaggcatagaaagacaaacattgcatgttctctttcatatgtgggagataaaaaagtgaacctcatgaaggtagagagtagattggtgattaccagaggcctgagagggtcatggggagagggagaggaagaatagattgattaatggatataaatttacagtttcaatgaagagataagacctagtatttgatagatcagtaaggtgatttatagtttacaatatcttttacatatttcacaataggtagaagggaataatttaaatgttgttagcataaagaaaagacaactatttaaggtgatggatatgccagttacattgatttgctctttacaaattatatgaatgtattaaattctcacatggaccctgaaatatgtacatctattatgtattgattaaaatatatttttttaaactccaggcttccccaagattgtaatccacctgtaatttaactgactgctagtaaagcctgttactttcagaggaaaacaattcaacctagagactttgcaaagtataatccacaatgttgtgtgtatgtgggctgtgtgtgtgtgtgaaggaatgagaaaatgtaacccaaacatttgagagagaaaaaaatgtgtgtagacatggtgacttttatcagaagttgtattaaggtatcttaaatttcagttcctattactttaaaatctaaaaaaaactataacagttatttcatgaacaaatctaccaaaaaaaattcattcaaatatttgcaatctgtttatgtttatgcatgagtgcccaaaagtatcttcagctctttttctccaatatttaacatttattcctgggattgaagaatgttccttctattttactcttaaacatcaaagcaatgaaactattaatcccgctaataatgatgcatatttctcaaagatgcctttcattttcagatcagcaaccaaaggagtttcaattgtctctccagttggctctaatgagagatgtacagatgttaaacccaatactcttcttaatcattttccttcgtgtacttgattaaatcctcaaaagcaaactgttcatgttcttgccgaaaatataggcggtctcacttaacagttatgttgcacaagaaagggaagttataatggcatggaacgtgctctacgtggtattttctagactttactagttcacgagcttttgtggataagtcaaactcttgaatgtcacttaaatgtaatcttttctgtagttgattatgcagagaatacaaaaggtatctgcagaatgtggaattaattttgaaagtttgataaaaacttcagaataatagctgtggctgtacaagtcatctatgaaactgttctctcataggtgacattaatttcctatctacagagttttattactgaatgtgttatgtttgtacccccacaaaactgaaataatagttttctttttttagcagtctatgaaaatgttgaggtttatcttgactgccgctttttaacataaatatttgggcttcattgaattcctaatatgtgatgtcacttggaattctgatagggtccagtaatttggcctgcaaagacatattttaccttaaaatgaaagggatagttgaaatgttattttacacgatagcaaaaaagcatccaacataagttgtgagatttttattgcttaacttttgaaatagaaggacaaggttcttatgtgcttgctttattccaaagtatatatgggaatgctaatgctttatatgtaaaatgtacgctacacatatttgtgattagttaatttttatggctagaaattctagaatcataaaaaagaactaatcttgaatgtcagagcttcacctatttttttaaaaacaatgagaacaaaaaaatcattataatttttatatttaccttgtgtttcacaaaaaggaggttttctttgctgtgctacactgcaagaatatgtcatgttcaaatctctggggctttattaaaaactttaactactgtcttcttatagagattattaagcaaatactaaagatagcatagatgtgtggtctaggcagtatttttctggcaagtagacctaagtgcagaatttaagttctgtaacattaacctgagactaaatcattttattcagggttgtctcctctgtgaacagctttatgttatgacctcatttgctacagcaaatgaaatattaatagatcattgaaaatgcagtaaagttttgatcagatgttataccttcattgtataccaaaccctgcctctcataaaaactttctacttgggtttaaattgaaattatcactcaattttttaaaatcaaacattttctttaagaacatgacaatgtaaacatatttcttacgggaatctttaagttctatatttttcaccaaaaatcatttcagaccatgctagttaaagagttattgaaaaaaaaaagaatctatttagatgagtcaaaaaattaagcaaagtatgttttaaataagttagtgactataaaatttctcaatttgggcatttattttgactgcaagtaacaaaacacctgacaaaagagacttaagtaaatagctctagatatatagttgactcttgaacaatgcaagggttaggactgctgatccccacccagtcgaaaatctgcatataacttttgactgtcccaaaatttaactactaatagcctactgttgaccagaagccttaatgataacataaaaaactgattaaaacatagtttgcatatatatttatactatattcttaccataagtaagctaaagaaaagaaaatctcattaagaaaatcataaggaagagaaaatatatttactattcattaagtggaagtggatcatcataaaagtattcatcctcattatcattatattgagtaagctaagtaggagaagaaagaggaaaggttggccttgctgtctcataagtggcagaggtggaagaaaatctacatgtaagtggatctgcacagttcaaatttattttgttcaagagtccgctgtggatagttgttggcattggtgaaccaatgccaaatataatggcggcatctttgtgattgttttggccttttcaaataactgaaagatgattgctgaagttgtagacatcatgtttagcggaaagaaagagaaaaggagaaggtggcagctctttcaagaaagctaaaatttcctaggaacctccataggagtcccatcatggtgttcccgtggcatctctgagcagttatgtttcatatcacaactcctaggtaaagtaaggcaaaggagaagcaggttagaagtaggcattaagttgccacatgttctaattgtcaccttgtttaccaagtcatgtatgtcttatctttgcttaccaaacaaaatgctctgattttcttgattagccatagtgacacttgcttcttgtctttgaaactgaaagtaataaaccacctcacgccatgtgttattcttccaaaagctaacataattttgattgatttgaaaatatatgatttcatatataaacatatataattatatatatatattagtatctattgctgccactttttacttaagactgatagcatcaatgttaaatagtgtcttttcagaagtattgattattctctctgttgcagatctcttcaaattgattgggtgtctccacggaagccaaatggcatcattcttggatatgatctcctatggaaaacatggtatccatgcgctaaaactcaaaagttagtgcaggatcagagtgatgagctctgcaaggcagtgaggtgtcaaaaacctgaatctatctgtggacacatttgctattcttctgaagctaaggtaagtcttttctaactaatcagtgaaccatgtttttctcactcaagactccaagtgaaattattagcttctcacaccatgatgtattatgatcaatatttccactactctatgaagaagactccacggaaaagaaaggatgcttacaaaaatcactatcaccctcatgagcactttagccttcccattttttattatcttcacaagaaatataaacttattagaatagggtacatcccaaattttatttgattgagtgacttaaaattttctttacaacagatcttttcagctacaaataggtgtttgtttatatggcactgatgagtaactgtgaggaggacattttatgatttgtcagaaatattttagcattatagtcatttgtagattaatgttcatattagatgcggtttagaaatcagatcaataatacagccagacagaggagtttgtaaatgacttttattgacaaacaacacaaaatccttagtttgaaggtagaattttatataatgaaataatgttcctatttggcaacaacagcatcacacattcaatggctaaagctactactaaatttataagatttactgcaaaagaacaccataattaagaaagtgagttactgaagcaatatggatcaaaatacaaattattatggctgacacaaatttagcaggagttatcatctaagaaatgcataaagccagcagttactaactgtgcattttttgatacttagactctaaaattatcattatgcctacatttgacatcattttatgccattaagtatgcacatatttaaatacacacatctgatgaacatatttgtataaaattaaatttgggatttctgagaagaaaaatactaaaataaatttgcccattaaacatatcctccacttaagaaaaacttgggaaaatgttggcaaaatacggaattcacttctcaatttttttctttgcttctattattttaatatttattatctgttacgaagtggacaaagagagaatagttgtataggcatacgaataaatgatttaaagtttgtggagtgcagaaaacaatgtgttccatcaaagtaaaaactgattctggccagaaactgtcatagtagtttaggtgtgtataatggatttgataagtttcaaccctataactttagtggcaaaatcaaagctaagtagagtaaaactagtaaagataatgtttccatttaagtttattctaaaagatcaaaaggtggatgttcttaaaatgttcatattaaattagaatatacctgagatagggtgaagaaaaagtaatgggatgaagaaaaatattaataaagtattaacagaataatatttacctatgtttaggctaaattatttataaaattactcctacctttctttatgctgtgatttcagaaaccgctttttgtaacttttaaaaatttactgaagctttgtaccaaataagtgactggttggtgtaacattcctaaattcagtgaatgacaaagaaccggttagtttaattttaaatcaatttaaaaatgatttagacaaatctactctacaaaaaaaaaaaaatcatacgggtcaccttttatagaaaataaatgtaaattgatgaatagggaagcaaaagttaggctttagaaaacaggcgtgtgcaaatctcaccacatagtcttgaaaagaaacatcacatttggttattcttataatgcaaatgtcataccttattacactaaaacgagacacactatttaatgatgccttaaacaaagtcttatttttattgttgagcttaaagaggcaacacaggtattgcggtaaaagagaataaaggatgtcagttaaatttcaaaaaaaaaattgtaaagttcagtttgggactaggtactaatacacatttcctagcatgaaagattggagagaagtagaaaagagacttgtattgcgggtttaaaagctttttggctaaatcactgtaaacatcaatgtttcccaaaatacttaaacaagctttaccataagattacagccatggttcacaaatcccagtgaacgtaagacctgggggaattgttaaaacctaggatttcatagctctagtcccagagattctgattcagtaggtttagatttggctgtgaaaatttgcatttctaaacatgttcccaggtgtcttagttcgttttcacagtgctataaagaattacctgagactgggtaatttatgaagaaaagaggtttgactcacagttctgcagacttaacaggaagcatgactgggaggcctcaggaaacttacaatcatggcggaaggtgaaggggaagcaaggaccttcttcatgtgatggcaggagggagagagagcgaaggggagagctgccacactcttttaaaccatcaaatctcgtgagaactcactcgcctttagacctacaataaaagtctctttcctacttctctccaatctttcatgctagaaaatatatattcatacctagccccaaatgaaatttacaattttttaaatttaattaacttcttctgttgtctttcactgcaatacctgtgttgcctctttaatcccaacaataagactttgtttaaggcattattaaaattttatataataaaaaatgtatatatttaaatatatctatttttattataaaattttatataataaaagatctatatcttatgtatatatacatatgtgtatgtgtaagatataagatatacatcttatatcttttattatataaaattaaaattttatataataaaataaaagatataaaattaaaattttatataattaaatacatattatattatatagtattataatagagcacaaagcatggttgaagacttcaaaaaagctgcattctatcaaataacatttataaaattcgaatgatcctggaaaatacatttttaaaccaacgaaatatgagtaatatggtctcagatcttctatgccttacaagaaaataattatattacatgagatacagtggtataacactcttaactaaactgatatttctttaaaactgttttcaaactttcaggtttgttgtaacggagtgctctataaccccaagcctggacatcgctgttgtgaagaaaagtatatcccgtttgttctgaattctactggagtttgttgtggtggccgaatacaggaggcacaaccaaatcatcagtgctgctctgggtattacgctagaattctaccaggtgagggttatttccaggtgtactcaaaaactatgggaacctgaaaacataaacacgtggttcatgtcagtgaactatttcaaacacctccctctcaacaaaaattgaaccataaacacatagccaatggcctgctctaaatattgtttcttccttctgctttgttaaaatataagcaaggctaaatattagaaaacgagagaacagaaggaatttacaatatctactacagaaagaaataaatctggagatctggctaactccttttatcttgtggctttttttattaacatgactatatattttcactattaaatatgtgaattgctgactgttccaccccatgaagctgttccccacttcctccatttctaatctgaactacacatgcattgttcttggatagatcgcaactgcaaatttcatttgtctgagaattctaggccactggcaatattctctcatcataagtcaggcaagggaaggaagaatgctgcaaagggtagcaaactggattttttccttcatccctttttagtattagccaacttagctagccattttgctccaaatttcaactacataaaacaatgcctagtgaatataattgggaatgatgctaataataactgccatttttaaagtaccaagtctctcgcaggctctgtattgaagactttacatgggataccttatagaatcttcacaactccaggaaatttgtattatacaaggcagtttacaagtaaggaaactgttttagagaggatcaataacatatccagattcacagatgtgcatagaagtgaaagaactaaaatgtgaatataagtatgtctctcctaaatctatgctcttttgtgtactttactgcctctttaaccaaaaagcatcaacctcttttgacaatttttttaaaaggactatttaagacttctaaacttcttcattactaccactgtcagttacaatttatcctgcaaaagtaattgagaatacaaaagtaattgagaatacaaacttttttctactacttaagtttgatactgatatcttctttaaagagcaggaaatggatataggagaaagacaagaaagccaagttttttggaggccataggaaagctgaatactttgagatatctagtttagggtgaaatttatgcccaacgtctggttcctgtaaattatgttcagtataactatatccatccaaggcatgtgaaatgagacactgtctaacccagtgtctgttttgcaaaatactggagcaaatatagaaggcgtgcaatcacctgatgggttcatcttgcccattgcacagatagagccaatttaccaaaacagtggtattgcaacagagaaagagcttaataaatgcagagccagctaagcagaacaggaggttttactcaaaacagtctcccagaaaattcaaaacctagggtctgtctgggcacggtggctcatgcctgtaatcccagcactttgggaggctgaggcgggtggatcacctgaagtcgggagatcaagaccagcctggccaacatggctaaaccccatctcttgtaaaaaatacaaaaaattaactgggcgtgtggcaggctcctgtaatcccagcttctcgggaggctgaagcaggagaattgcttgaatctgggaggcagaggttgcggtgagccgagatggtgccactgcactccaacctgggcaacagagtaagactctgtctcaaaaaaaaaaaaaaaaaaaaaccctaggggtttttttggttggttttttgtttgtttttgttttttgtttgtttttttatttgtttgtttgttttgagatggagttttgctcttgttgcccaggctggagtgcaatggcgtgatctccggctcactgcaacctccacctcccaggttcaagcgattctcctgcctcagcctcccaagtagctggaattacaggcatgtgccaccacacccggctaattttgtattttcagtagagacaggctttctccatgttggtcagggtggtctcgaactcccaacctcaaatgtctgcccaccttggcctcccaaagtgctgggattacaggtgtgagacaccacacctggcccagcctagggttttttttaggatagtgcagtaggcatagggctagggaatgaggaatgcttattggttggggataaaattatagggagtcagagctgtcttcttgtccttagtcagttcctggatggggactataggatcagatgagccagtttactggtctgggtgatactagctggtccctcagaataaagagtgtgaaaaatagctggtccctcagaataaagagtgtgaaaaatacgttgaacaccaatcttaggttttacaatagtgatgttatctatggaagcagttgggaaggttaggaatcatgtggcctctggtgccatgaacacctaagccgtagttccttgtggctaatttgttaattttataaaggtgctctgccccccaagcaaggagcaagtttgtttcaggaaaggactatcatcagtgtttcgaagttaaactaaacacctctcatagttatcttggcctatgcccaggaatggacagggtagcttgtaggctagaagcaagatggaattggttaggtcacatttctttcactgtcataattttccagtgtcaggattttcttactgtcataatttttgcaaaggtggtttcaggtgtcctgattaaatactgctcaagttttctcaaggcagagaaccttcactcattatttttccttataattaatagaaaaaaaaagtttgtatagcagtgctgttatttcttattctctatcaaaaatatttcaaaattgaataagttctagtaaaccagattttccacttaagaaaaagtaaaaatatatatggaaataaggattttgtagaaaactgttaaacttcttcatactacagctcacgatgtcaacaatggatcaaatactgttaaatgctttactttctcgaagtaacttaaatttggggagttttcatgtatgattcatatctgcccttgattacaaatcattgctataaaattataattacagtgatcagatggacgttttgtgttgttcaattcctaccattcttcacaccagtagaccaagttgatcatggaactaagtaatagtgttttcatttccacatcacattaaaatttttatgttatgatttgcaacaaactattcaaactctacaaaatatcctctgtcccttaaaactaatgaaaaattcttagttacatcttcactgctgctaactcaggagactggcctgtgactttctcaatgctaacataagtagtcagattttgaaccgacagcacaatctacttttgttaggtttcaaaataaaatttaacatttttcttaaaaatgaaataactcatggaagctcagaagttgtcattgatattatataagcctttaataattaatttttagaccaaggatttaaaaaatatgtattgtctgtatgtataaatacatgtttctgcacacctaaagcattttaatatctaccaaaccattgagcatgccccaaattttgattcttttttaaatagttcatttttcatagcattagaatgcataccctggtgtcaagaaaaaaggaaaaaagcaatctcatgaaataatcaaagagtgttttgctccaatcattaatcccactgtacctaaatgaagagattattttgtgacctctgtcctcagccccgtggtctttgttagctagtttaacactggttacactgagggggaaaaaagcgcaatggtcccaaatcctgttgcatctaaatgtgatttaaatctggtcactagtctgccagttcaaggccaagatgggtataggcattttgatatttatggattagcctgaaatattggtaaatacgtactttattttttttctcatgactttcttccataacaccccataacaaacagcagaagaggaaagaatgctcatttctctcccttttttaataaatatgctaataaccccaagtaaatgttaatgtgggtcattctttgataagaataacaattaactgttagactgcatggtagtttttagagagaaaacattttcaagcctggcctgaaatagattcattttgagaggttaatgagaaggtgactgatccttgtatcttatgtctaatagcccctttttgaggaaaaaaaaatagttttattttttattgatataatccacatctttttttttttgaagacttttcttctgtcagtaactaaataagattctgagggattcagaaagacatagctaaaatatctaaaccaattaacatttattatgctcaaaagaggctttaaaaaaaagtattggctttcgccatgtagatgtgtatactatgtttcctctaagctcaccattgtcctgagtggtgtttaattaactgttgttgccctgtaccatgggatacattatcttaaagtttaccatagagggacattatgttctttgactgtgaagacaaaaaatatggcaactacatttcagacgaaatagaattattttacccaggggaagataacaaatacagtaactttactgtttacaataagctcgttgctccttcattggtctctggtagcatcatcatggaaacttttactaagttccctttttcttagagataccatattataggatcctttcaaagataattgactaagccaactgtctcctgaattctagaaattcatattttgagaaaatcctgagtatgtcttgatccggtcctggatatttaccctagagaaaagcaaatttatgtttacacaaaaacctgtacatgagggtttacagcagctgtaatcattactgccaaaacctggaaacaattcaaatgtccctaagtgagtaaatggacaaatgtggaacaaaggaatactatgtagcaataaaaaagaacaaagtattgataagtgccaagaagatatcaagcccagtgaaagaagccagtctcaaaaagctaccaactgtgagactgcatttacatgacatactatacaagacaaaccatagttttggagaaaaaagttgacaattgccaagggtaatggatgggaagggaatgtgactatacagggatagcgtgagggtgttctgtgggggtgatgaaactcttttgtatcctgatggtgtttcttcattaaaattcatggaagtgtgcacccaaaaaaactaatggtcctgaataatatttttaaatgaaatatttttaaaacactatttccattttacacataggaaaaatgggacatagaaacatgaccaagacactcagctagtcaaaataggaattttcatggttaaattttaggttgagctcctagagatggtgtgttttataataatgtgatgactgtgtatgagtgacttaatatatttttctcatatgttagtagaacagtaagatagcaaatatatttccattaaaattacaatgaacatccctatctttaaaagaaagcaaaaatgtcttagtcagtgatgactatttcaagtaatattttacatgatcacattcttatgaaagcataagttttgtgtagtgtttccgtggtttgatgctgaataattagtgaataagatattggttctggagtcaaactgcctggctccatatcccatttctttcacctcttagttgtttgaccttcattaagtaactttaggaatattagcagggtattaatgtttctgatgtccattgggctgctgagttagaatactcaaagctaaccctatcttttatatctaaatagaaaaaaaatgtttagtaattgaggagcatatgagtaaagagggctaacaggcctcctttaaatgacaaagtttctaatgaatctttccagagcaaggactcaggggtgtccactttcatcagatcatgtaaagggatagccagttcccaaaagctaagattcaaacatctaatgacctttgagatcctatgaaacaaaggatccttgttgatcctatgaggccaagcaattctctaagttgacttttagcaactagccagggaaagtcatgaagagcttccaaactttgaagagaaaaagactttccattttgcaaaatgtcacagcctagaatttaggtcctagaaaaagcattttgttctgacaaaattgacatttagagactttatgtcgattgtatgctaccactattgacaaatagagggaatcaatttttcaagtctatctggagaacgtgacagatgatcattcacatattgcacaacagttgaatcttataggggaaattaaatatcgctcagtttgtttcctattgctgctataaatcatgaccagacacttcgtggcttaaaaccacacaaacttactttatacatccaaatatcaaaagtttgaaatgggtctcattgaactaaaactaagaagttaacaagagctgcattcccttctggaggagagaatccattttcttgccttttccaccttgcagaggctgctcacattctttggcttgtggaccccttccattttccaggccagcaatgaccagttgagcctttctcacttcatattattaaacttaatcacatctgttgtcttcattcccctttgccatgtaacataacatagtcacaggttccagggattaggatgtggacatcttagggaggccatgttgtgcttaccatggtaaggtaatggttaagcagttgtgagaattaagaaagcattgtcgtaaactcttggggaataactgtcacaagtgaaacaaaaaaagatactgtgagcctgagtgcaagaatatatgaaaaaaatgctaagtatagatttgctataaattaagcagctgcctcagggagtggcagtaggatgatattagggttgggaactacagggaaatgggggagtgcaatcttgttaatgacacttaaatcttgtacaaagtggtacacaagtcttttatcattttgatagagtgaacagtgaactacaaggactggtacaggggataatggggtgttatgccaagcgaggtaactttctagaggtatgtagatacaatggaccaagttattaaatattgttctttttagtagattttgggacagtttcaagaaatgcatagccagattgatagacatctttaaggggttagcatcctgtatgaatcccacatctgagcagtttttgccccagaggatcttggagacacattcaaagtcagagatgttgataacaaaggcatcaggtaattagctggtgctaccaccaaattataggccaggcattcttctcctgggagttacagaaagagactttcaggtgcacatttaatgctggtatctcatttacaaagtggatctcttctcaacagatgcactgaagtggaattactaaacaaaaaatatgttgattcaagagaaagaaaagaaaaataaaggcagaatctgaaaattatttgatatgtgtaccgctgagacatttggttattcctagaaagggataatggaaaattagaagggtttttgatagataatatacctaccaccagtatcaatcttctatttttacaattgcatagaaatttctcactttctatgtcaagggcagttatggatagatgagagcagctactttcacagagaggtgctgttttgtcagtttgtccttttttttttttttttttgattgtgtctttctaagatacactaataaaggcaaagtaggtgttctcccagtgtcccttacaatattgaaagttgtttttgtgcagactagacatagaggtgccctcattcttggctttatctaattgcttaatcccaaaagctgttaatgtggtctgaattttttttctttttttctgagccaaagtatcttctaagtgcttagcaagctcttgtaatttagaaggaagggacaatctactgtcttatcttctgttttatgggaagttatgataccttcttcactgatctttagagtattctggaaggtggtagttaagtgatctctgaagccaggcatggatttattttttccttgtttacaggacttttttgtggtaaagtatacaccacataaaatttatcattttaaccattttttaagcacacaattcagtggcattgagtgcatttgcattgttgtacaatcattaccaccatccatctctagagctcttttatcttctcaagctcagactctgtttccattaagcactaactttccactccctgttatcttcaacccctggaaaccaccattctgtttttggtctctatgaatttgactactctaggtacctaatataattggaatcatacaatatttgtctttttgtgtctggcttatttcacttagtgcattttctttcttttttttttattatactttaagttttagggtacatgtgcacaacgtgcaggttagttacatatatatacatgtgccatgttggtatgttgcacccattaactcgtcatttaacattaggtatatctcctaatcctatccctcccccatctccccaccccacaacaggcccctgtgtgtaatgttccccttcctgtgtccatgtgttctcattgttcaattcccacctatgagtgacaacatacggtgtttggttctttgtccttgcgatagtttgccgagaatgacggtttccagcttcatccatgtccctacaaagaacatgaactcatcattttttatggctgcatagtattccatggtgtatatgtgccacattttcttaatcctgtctatcattgttggacatttgggttggttccaagtctttgctattgtgaatagtgccgcaataaacatacgtgtgcatgtgtctttatagcagcatgatttacaatcctttgagtatgtacccagtaatgggatggctgggtcaaatggtatttctagttcaagatccctgaggaatcgccacactgacttccacaatggttgaactagtttacagtcccactaacagtgtgaaagtgttcctatttctccacatcctctccagcacctgttgtttcctgactttttaatgatcgccattctaactggtgtgagatagtatctcattgtggttttgacttgcatttctctgatgcccagtgatgatgagcattttttcatgtatcttttgtctgcataaatgtcttcttttgagaagtgtctgttcatatccttcacccactttttgatggggttgtttgttttttcttgtaaatttgtttgagttcattgtagattctggatattagccctttgtcagatgagtagattgcaaaagttttctcccattctgtaggttgcctgttcactctgatggtagttttttttgctgtgcagaagctcttgagtttaattagatcccatttgtcaattttggcttttgttgccattgcttttggtgttttagacatgaagtccttgcccatgcctatgtcctgaatggtattgcctaggttttcttctagggtttttatggttttaggtctaacatttaagtctttgatccatcttgaattgatttttgtataaggtgtaaggaagggatccagtttcagctttctacatatggctagccagttttcccagcaccatttattaaatagggaatccttttcccatttcttgtttttgtcaggtttgtcaaagatcagatagttgtagatatgtggcattatttctgagggctctgttctgttcctttggtttatatctctgttttggtaccagtaccatgctgttttggttactgtagccttgtagtctagtttgaagtcaggtagcgtgatgcctccagcttttttcttttggcttaggattgacttggcagtgtgggctcttttttgggtccatatgaattttaaagtagttttttccaattctgtgaagaaagtcattggtagcttgatggggatggcattgaatctgtaaattaccttgggcggtatggccattttcgtgatattgattcttcctacccatgagcatggaatgttcttccatttgtttgtatcctcttttatttcattgagcagtgctttgtagttctccttgaagaggtccttcacatcccttgtaagttggattcctaggtattttattctctttgaagcaattgtgaatgggagttcactcatgatttggctctctacttgtctgttattggtgtataagaatgcttgtgatttttgcacattgatgttgtatcctgaggctttgctgaagttgcctatcagcttaaggagattttgggctgagatgatggggttttctagatatacaatcatgtcatctgcaaacagggacaatttgacttcctcttttcctaattgaataccttttatttccttctcctgcctggttgccctggccagaacttccaaccctatgttgaataggagtggtgagagagggcatccctgtcttgtgcccgttttcaaagggaatgcttccagtttttgcccattcagtatgatattggttgtgggtttgtcatagatagctcttattattttgagatacatcccatcaatacctaatttattgagagtttttagcatgaagcgttgttgaattttgtcaaaggccttttctgcatctattgacataatcatgtggtttttgtcgctggttctgtttatatgctggattatgtttattgatttgtgtatgttcccattcatgttgtcgtacgtgtcaggattttattcctttttaaggtcgaataatgtctcattgtatgtatataacacttttgtattcatttattcatcagcggacattggggttatttctgcctagtgactattatggttaaagctgccataaacattgatgtagaaatgtacaaatttctgttcaatctcctgttttcaattcttttgggtttatacccagaagtggaattgctggatcatatggtaattctatgtttaattttcatgttaagaactgccatactgttttgtggaacattttaacattttatattcccaacaacgcataagtgtgccaatttctccatattcttactgtttattattttatgttttttataactatcctaatgagtatcaagtggtatctcattgtggttttgatttgcatttccctacttattactaatattgagtatattttcatgtgtttattggctatttgtatgtcttctttggaaaaaagtgtctattaaagttatttgcccatttaaaaaataaggtctttgtttcatgtttttgagttatagaagttctttatacattctggatactacttccttatcagatatataattttaatatattttctcatgagttgccttttcactttgttgacagtgttctttgatgccaaaaagttattaatattaattatgatgaatccaattcatcttttttccttattgcttctgctttcagtgtcatagccaagaaatcattggcagacccaatgtcatgaaatttcccctttgctttcgtctaagaattgtaagttttagcttttacatctagatctttgatccattttgagttagttttggtatatggtataaagtaagggttcaatatcattctttggcatgtggatattcaacttttccaacattctttaaaaaaaaaaaaaggtcctttcctcattaaatggtcttggcacttttgttgaaaatcatttgcccatatatgcaagggttcatttttaggatctctgttctatcccattggtctatgtgtctgtctttgtaccagtaacacacttttgattactgtaactttgtagtaagttttgaaatcagaaagtgggagatctccaactttgttctttttcaatgttgttttgactatttgcagttttttgagattccatgtgaattttataatggcttcttctgcttctgcaaaaagcattgggattttgatagggattgaattgattctgtagatcacttgagcagtactggcaccttaacaacattaaggctcccagtccataaacatgggatgttcttccatttggttatcttctttaatttctttcaacaacattttgtagtatttcagtctttcgctttcttggtaagctcattcttaagtctttctttttttgatgttattgtaaatgaaattatcttattaattttattttcatgttgttcattcttagtgtatagaaacatacctagtttttctatgctgactttgtatcttgatactgtgctgaattgtttattagttgtaacaggttttttttttttttagaatctttatagttttctctatatgatatcatgttgtctgagaacacatagttttgcttcttccctttcaatttagatgccttttatttttttctcttgcctattgctctagccataatatccaatattatgtagaatacaagtggcaaagggtggcaaccttttcttgtttctgattttagaggaaaagttttccgtctttcactgttgagtatgacattaggtataggtttttctcatatactcttgattatgttgaagtagttttcatctattcctattttcttgagtggatttataatgaaagagattgaattttgtcaaatatttgttctacatcaactgagataatcatgtgtttcttttttttcccctttgttctattgatataatgtgttacattgattaaattttcatatattgacccatcctggtattccagggatatatcccgcttggtcatgttgcagaatcattttgatgtgcttttgaattcagtttgctagtattttgttgaagatttttgcatcaatattcatgagagctattgattttaacttttttcttgtggtttctttggtaagttgtatgtttctagtaatttgctcatttcatctagtgagatggatttttggccaataaatttggaaagaaaagatctcaaggatagctgctgagagttattgtcttattatttatactccttatatatctatgtttaattaaatattgtcccatatttttatatcattttggtaaacagtacatcttgcttttactaaacaaattttaggatatccagggctcaccaaaaggtgaactaattgagaagaagtccaggactataaatccctaaggcagtcctaaattcttcagtggatttgtgccatttcttaagaaagcttgacaagtcattaattggattatagaaatcttacctggaccatggttgaaggccataagacccatcagattggtcatcatactcacataccttataagatataatgaagagatgttgtccaggggaaaagatatgttcaagaaagaacggtagagaaaagggaagaaggtctgttgaaggtgtaggaagaagaggaggagcaggacaaaagagagaaggaagtcagggttccgaaggccacgagggaagacaaccacagtggggtcatgagatagagaagagaaatgaagcttggatttcagatccaccaagtttttattagttcttttgaaggtatccttaagggaagccatttacaaaatcttctgtcctttagagttgtctttataccaaacaaacaaacaagctaactcttggtatttagagtatttgagtcctttgattttaaggtaccaggcaaaagattatctaattctgttttttgttttttttgtttgtttgtttttgttttttagatatgcccaggctggagtgcagtgaaacaatcctggctcactgcgcactctgcctcccgcctcccgggttcaagcaattctcgtgcctcagcctctcgagtaggtgggactacaggcatgcaccaccaagcctggataatttttttatttttagtagagatggggtttcaccatgttggccaggctggtcttgaactcctggcctcaagttatccacccacctaggcctcccaaagtgttgggattacaggtgtaaagcaccacacctggtggattatcttattcttatcccaaatttcccagactgtcatgtgaagagaaatgtagtaaaattcagtgtgtgacatagcccagagaagtactagcacactgacttaaatacagtattttttacctcctctcatgtaattaaccttcccaatgggagtattttgtttggttgaacaaatatagtttggtcaaggaaattatagtcataagcaatataaatttatcaatagttggtttttgaatccactctacgttccaaaagaaaattacacagaacaaaaaagtattcctagatgtttttctataatgccacatagtccatgtcaccagacctgatggtgaggaaatagacaacatagacttacctgtaagttgccatgtgtgtatctgatctgacacacgtttatacacaaaaactttggagtcatttggaaattttgcaactccaatatgatattattctctttagtaattctgtcaatcagttgggatctgcaagatgattgtgataaaagttaattgttagtcatagcatatttttttaactgatgtaatgattattattgtcctaaattgacaggtgaagtatgctgtccagatgaacagcacaatcgggtttctgttggcattggtgattcctgctgtggcagaatgccgtactccacctcaggaaaccagatttgctgtgctgggaggcttcatgatggccatggccagaagtgctgtggcagacagattgtgagcaacgatttagagtgttgtggtggagaagaaggagtggtgtacaatcgccttccaggtaaggggcccaggtctacctttcagtagatggaggatctgagaagcagagagagtgagaaatttgccctagaaataaaacaaataagtaattaaagctcacattggttatatctaatgcaataattaggaacatattgtttaacacataacaatgtaatctcccaatttttacatgtatctcatgtatttcataaaaacgcatcaattttttttcctcttgaaaaggtcatgtcctccaaaaaaaattccacacatgaatgcattggttatgaatgaaaagaatatttcctagcaaatagtatacaaaattattataatgatattttgttataattcttttactcccttattctactgtattaagctaacactaatataaataacaataagtatcattgaatgaatactaacagacactgtgccaatattttatatattattacctcaaataatcttcacaataatcttacatgataggtactatcaattatctgcattttaaaaatgaagaaactgaagttcagacattagatattagacattatcttgctaaataccacacagtcagatccagattttgggaagcctgacatttatgttattggaggtggggcttttaaagacaagaaaattaaaatatgaagttaatgttcacagtatcttcaccaggcatagattccatctcaagaagccactttctttgctcctccctaagaagcaactcctcatctgttagttttatgattgcagcaattcagttacctcttcaggcttcacttctcattccagttctcttgctatttccactgcatctgcagttatttttcccattttgagtctaaaaccccttagtcatccatgagggttggaatcaacttcctctaaactcctgttaatgttgatattttgacttcttcccatgaatcatgaatattcttaattgcatctagaatggtgaatcctttccaggttttcaatttactttgtccagatccatcagaggaattactatctatggcagctatagccttacaaaatgtatttttaaataataaaactggaaagtcaaaatgactacttgacctatgctgtgttaataggcatgtaaacattaattttcttgtctatttccatcagagctcttgagtgaccagatgaattgtcagtgagtattaatattttaaaagaaatatcttttttctgagcagtaggtctcaataatgagcttaaaatacatagtaaaccatattgtaaacagatatgtaatcatacagcctttttgttccatttacaagcacaagcagaatagatttagcataattattaagggccctagagtttttgcagtggtcaatgagcatgggcttccacttaaagtcaccagctgctttagccccccagcaggagagtcaacctgtcctttgaaactttgaaaccaggcgttgactttttccctctacctatgaaagctctagttggcatcttcttccagtacaaggctatttcatctacaatgaagatctgttgtttagtgtagccaccttcatcagtgatcttacctaggtgttctgggtaacttgaggcagcagtttctacatcagcacttgctgcttcaccttgcacttttatgttatgaagatggctttttttcttaaacctcatgaaccaacttctgttagctttcatctattcttctgcagcttcctcatctctctcagccttcatagaattaaagagagtaagagccttgcctggactaggctttggcctaagggactattgtgactgatttgatcttctatccagaccactcaaagtgtcttcatatcagcaataaggctgtttcacttattcataagtgaatgataagtgaaatagaaatcttacctggaccacggttgaaggccataagacccacaagatttgtcatcattctcacataccttataagatataataaagagatactgtccaggggaaaagatatgttcaagaaggaatggtacagaaaagagaagaaggtctgttgaaggtgtgggaggaagaggagcattttgattttcttcaagaactgttcctttgcatgcataactgggctaactgttgggcatgagaggtctagtttttggcctgtcttggctttccacatgccttcctcaataagcttaatcattcctagcttttgatttaaagtgagagacatgagactcttcctttcacttgaacacttagaggctattgtaaggtaattaattggcctaattttaatattgctgtgcctcagagaataggaaggcctgaggagagggagaaagataaaggaacggctggtctgtgaaacagtcagaacacacaggacgctcatcaactaagctttccgtcttatatgggcaaggttcatgacacgctaaaacaattaccatagtaacatcaaaggtcattgaccacaaatataaatataaaatataaaaattaaaaatataaaaatataacaaatataataataatgaaaaagtttaaaatattgtgagaatcatcaaaatgtgacagagacacgaagcgaacacgtgctattggaaaattggcaccaatagacttcttgatgcagggtggccacaaaacttcaatttgtaaaaaaatgcagtctctgcaaagtgcagtaaatcaaagcacaataacgtgaagtaagcctgtgatactaaactactatatgcctttttaactcttattctctcctatgtgtacagcagagcttttcagatgttacatggcatgatttgcaacagatcgaatgcagactcagaaagaaaattaaattgacttctcttaactaaacatttaaaaagcttgcaaaaatataacacaatgtcattcttctattttttatttgaaaaacatttattttcataaatatgttagaatgttatagatttattattttatgtctaaatgcattaataaatatttcaaaaatttctgccgtaagttttaacacagtacatatcaacaggtaaaacccatataaacaaaaggtatttggggtcctcaataattcgtaagcgtataaaaggatcctgagaccataatttgagaaccactgcttaaagtcatagtaacgtctactagaaaattatggcaactaattagttatcctgtactatgactaaccagttgaatacctcctcctcctttagatgaagtagctaataacaggtctattaaagatagaaccaaggtggcagggagggtgcaaaagtgttacctcctgtgtactctaatacatcagagtttaaaaatgacagcaaaatatttgattttagtgtgtttgttcatctgtagctttttaaaagaattagtcaactgctatactccgtcctttgttaaatatgtattatgtagtaaccatattcaagacatcattcttggtgctttgcaagtgtaaaaatggccaagattccgtttttatcctcaagaacttacaacctaatcaaggagaaaagtgcctacaaggttatacacagaccataagagagggatgaatgcatgcatattcttaagacggagagatcactccagtcaaggtaatgaagggggttgttccattggattggaatctcaaacagtgagtatgattttggcaggtgtggcttgagctaaactgtgaaattagcaatctgcaaaacacaaataatagcgtgtgctttggtttacaggaggtatacactctgtgtaaggaagaaaggagataaatctgagtaggcaaaaggatttgaacattatttagcactcagggaagagtcaatatgatgataagaactgtagtttaagattaaatttaggtgtcagaacaaatacaatagagaaggaaagagaagtcagaacacccctggcatgaagtaaaatacatctgttctaagaagtggaatggaggttaccgtccactaggacaatggttcttaacttgttttccttttgaatcttttggaagttacaaaccctcactctgaataatagtgcatggaatatacacaaaaatttgcctgtaattttatccacccttgaactccatccatgaactcaaatttcagaatcacttctttatttactccaagatgatgtcgcatgccagtcaaacatttcttacacaaatggtgacagccctcaactcttgcgaatcaagataagctctagagtttctcatggcattctacagctctgccaactctgataatcatagtggacttaaggaataatagttttacaaaggaaaaaatatatctttttattctcttgactttctttctgcaggttgcactgaaaatagacagattccacatgtatttttcctctctctgctgccgttcactcctgtagcccctaatgactgtgaccttaatgaccttccagaatatccatatggccctttttctcctcaacctagcaacaaacagcatacctgctacataagtgtttggatctcataatatcgttcctaagcctggcctctctcgctgcctggcattgtgtgcctgccacgagaccgggctggctcgtaaaacatctctttatgtactttattacttaaactcttttatttgcctgcaggagccctttaacaaaatcacattgaattgactttctcacaccaaatcaaatctccctggtcccagttcagttgtctttgtcaatatgtattttataaatggagtgaattaacagatgctgttggaacagaagtgctggggtggcgtttatgtttttagtgctctctctgggcagatgcgttgtgtagaagtgttatacaggtatctcgggatgaaagtcatgcgtgtcatttcagtggatatgtattcttagccattttctttgaatagattttaaacctatttattactcatttttttcttagtgtttgcttatatagctttatcatttatgccattaatcttggattggacttgattatatcccttagtatgaaaaggtgaaaaattaaaacctccgtttcattcaaagaggacagatttttctattagccatgggaaactgatcatgagatgactttggaatatattgacttatttatattataaactttgtccatgcggcctttgatgtgaaactctgagttgaaattgtttcagaatacaagactgagttttcatgtcctggactctgacttcagtagaacaaatgactatcgctgtttgtttcataagatgggaatttgggaattttgcagagggaagtataattacagaagtccatggtgtaagggtggcattgaaaaaacatttccctggaagatttccataaaacagaatgattttttttttgaaaagtgtaatatatcagtgctataaaatgtatcacaatgatttggggagcatttttactctaccctctgttttgtggtggtagtcacagagccatctactggtgaagacaagtgtgaatttcttttctttcatgctctgccacaaatgttatacatttgtcctaaggatgactaatcacaaaccttttttttcttctaggcctaaaatatcccttggcttaaaatttggtccccatgaacaatctcagagtttcacaatgatttgtcatattccagactggattttactactatactatttttatctcaaaggcatgatacataattcttggtcttctttaaaaaaaagtggaatcccagttttgcagtcttaactatttagaaattcatccaacagatatgcttataaatgcttttctttttagacatagatatgaaataagcattggtaacatatttgaagtattaataatattgtgagtaaaaattttttcctccactattttctcagttgtgtccaatcaatggaaaccattggatatatatacagtttagaaagacaatatatgctttttcatctgaaaaataaacacctactagtttaatgtgtactgtaccactttactaacatctgcattttgttcaaagacacactccaccttttgtacaaatttaatgaagaggctctggaagaatggaccaatccatcaataatgcatgacctattttgtttttctttgggcatatttaaaatcgtgcattccgtgtgtcaaagttcaaaagtcaagtgctacatgtgataaattaggtaggggtcgaaagttattgcaatgcagtttcggaagattgtctgtctctgaatttgcagctcattcatgctgaagtgatgcactatgggaattactaccaaactctgctccgcaacatctgctctccctaagtgagttagtgcacgtcagacatctttatgtcagaatattgcagtgatggatgcagtcttcagaaaatgctgcataaaaatctggtgtgccgttctggccattaagtgaaattactatttaaattaatggcactgtcacagtttatctgtgcaaagaatgaacgctgattagggtattaagtaattagcaatttatcacactggaacaaggttgataataattaaagaagtaatggtttaccaaagaatctaaaaagggagtcacttcttgttatgtgagtgaaatcttggctgaaaatttcaattcagtaatacaaagatgaagctctttgtgaaagaaggcatcttttttttctagtttaaaaacagttcattatcaaaattttagttgacctgtcagaagtccctcagagtgatcagatgactgattaggagtttcaaattaggtcaatgtctgcatttttattttatacttaaagcatagtgaaaccatgaagtaatttgggaatgagagggggagaatatattccgctccctaaagggccagttttcaaattttgattgctctttaaaagagaaacatgaattgtcttcagaaaactgccagagaaaaaattaacagtaaaaaaatccatggttgtatttaaatgtctaatcagaaggggcagaaaaatgcccgaacaatataaaacttgaagctacggatttttctttttagtttatgtgtgtgtgtacactcatgtatgtatatatttatatgtatttgtgtgtgtatatatacacatacatatgcatacatacatagctacacacacataaatatgtgtatttgggtatgtacttatacatacacacatatatacccaccataatccagactcagactaaaatgagccctgctctttgtattaatttgagataacttttcctagaaatgttaaaaccactaaaattataaatatagcagttaatttgtaaaccaattacttcgaagagttatcacattagataaacatggtatgccaaagctctgttagaatcagtgtatatcattaatcataaataagagtttttaatattagagacttttgtaagtaaaaagatgaatgagagggttctttggagtcatgtgtggataaacatctttcttaaggcatgtgccaaaccaatgtctactttcaatgattttttttaaaagcacttttgatcttttatttgagtgtctttaataatgtagatgtttacacaggaccagattaaacaattcaggaccccagggcactttgaatttgaggttctttatgttatcagtcggaactaataataaacaaacaaaattccaattaaaataaatcattcatcacattgtgctgctatataactggatataaattctaatataaaaacactgtgacatgcagtatagccaccttgatttctagcttgatctgtctctagagtagtgttaatttattcctgctttaatgttaaaatttctgccatttctctttgatggcaatatctaaatgatgcaaatgcaggtaattaaactaaatttggtgggagaaaatgtctatttggtatctcaggtacgtgtgtctttcgtttagatgtggggatcagtgatcctctctacaaggtctttctgcggctgcccccagcctgtcacctgtgtctgtgatgggtctagaacagagtgaggctcaaaaaatagtggctgattagtgcacctgatcagtgaacatgctcagctgattatgaataaataccaaatccatctcatgcagaaaacatggttaccattgcagctaaattcacaagaaacaaatatttgtaccctaaataaagctaagccaaaacttgcactgcttctcccgcagggcttccagttctaggatggtgctacctttccactctgcctgggcttttatcccagagtacttgggtgaccttttctcccttatgaatttctagagctttctcagagtccctatagtttaactaaccttcttctgcaacaagatgttatcatcacaaaatgcgcaggcagttttcatgacagaaatcctatctctttttatggagcatgagagaagtttggcccagctgaatgattttcgaacatttcctcttgtgtgttcttttcctaattagtgtctagtgctcttggtaagaaggaccctcactgcacatttaaatcaccttggtagggaaatgctaccttaggtattgcaccatttcagcaactgcctgagcctgacatttttataccaaactttatagcagcctcagttttcttccctttttctatttcatattcatatataacattttattgttgcaggtatgttctgttgtgggcaggattatgtgaatatgtcagataccatatgctgctcagcttccagtggagagtctaaagcacatattaaaaagaatgacccggtgccagtaaaatgctgtgagactgaacttattccaaagagccagaaatgctgtaatggagttggatataatcctttgaaatatgtttgctctgacaagatttcaactggaatgatgatgaaggtaattgatagaaaagctctcggaggcgctgatttgacaatggaaagagaaatacattgttcataactatttttctaaaataggaatataaaaactcctgtgtgcattattcattttcacattacatccatattaataccgaatgagttcgctatgattgatgttattgcaatgaattctaaaggaattaataatgattagctgttctcagggaagctttacccagcacttcagattagtgcaggactgaaagtctgtgtgccactgaaagagccagcacaggtcgtctggggcctctgcatggtgccatttcatgcctgggagcactgtggatggaggcaggaggaaattcccgcttcttctccctagcccgccagccatcatccaccactttcctttgatagagaccttagatccagcaaattcgcttagttgcatttatatcatattcccttggacaatgcaagatgagcaaatgcctgtgtcaaaagtgaatgaataggcttctgggtgtaatcgcttatgtttttgtatggtgatggtttgtacacagccatgtcatgtatgtgggtattaaacttgacccaggataccagaagcctatcaatttaaggaaaggaccatggacactttaaaaataaacatgctaccgtgttctgtagtaatttgtcattataagaccactaaaaatgggtgtcttggtcacagacaatggaaggacgcttgttcaatgaggcaactacacagtccttgtgtagaccacatacactttgtacactttgggatgtaaaataactcatgagattgttagaagccctgcaagcactttgtatcaatgaatgattaagataacacataaggttggttaaattattctaatgaggacaatatttctccatgctgaatcaagtagtgtgtatacataataatgttcagtctgtaggtttcattttgttttctgaagacctaccacctggagacatttatatcctgttccagtctggaatggatcaccatgggatttttacatagctggcccattcggtcttccctaagctatcaattcaggaattccttttacctctttcctgtgttgattcccctgtttttttgttttgttttgttttgttttgttttgttttggattccaagtttcattccatttggagaattatcttcttgtatatagatgtatggagggtaaattttttaaaagcttaatgtataaaaatactattattttaccctccaacaggattgatagtttggtctgatatacaattccaggttaaaaattatgtctactcagaattttgaggcatttctgcatgttttaagcttccattaatattttgattcctatctctctgttggtaaccatgtttcttttcctatgaaagctcttgaagatgttctctttatcctgctcctctaaaatttcatgacaatgaacctctatgtggaagttaggatggtttctttttgcattttgttttccatttttgtgatgagagcatttaggatctactctcttagcaattttttttttacattacaattcattatgagttaggcagttgtcttccaagtaacatctctagaaccgaagccccttacatcttgtgatgcttcatgcagcccttggatcataatggaaaaggcgcaagaggggacaattgcacacagacagttcctacctggatatagagtacatcctttctatgcactagtcacacagacatatctagtcaggtggcttctcctactgcagccaggtttcaacatcccatgttcccagagagaaaagggaaacatggacatcactgagcacattgcattgtctctgccacattcatctactttccagcttccaaaaaggtatgcactgtcttgtgtgtattatttttctccattttttcttagactttcaacacgtaaaccagtattttactgtcatttagttgggcttttagaggatagatagatagatatagatagatagatacacacacatacacacacacacatatatatatagtgggattctatttatgtagtgtcatcttggctcactgcaacctctacctgctaggttcaagcgattctcctccctcaacctgccaagtagctgggattacaggtgtgcgccaccaagcccagctaatttttgtttttttagtagtgacagggtttcgccatgttgatcggtctggtctcgaaatcctgacctcaagtgatccacccacctccgcctcccaaagtgttgggattatagacatgagccactgcgcccagacccactatatatttttgaatgtactattttgatcaacttggtaagaataattcaacttattttatgtaagagagaggctgaatggagatcaattttaatagcaaaaagtattctaaatacattatgctacttatgtaaaggaaaggcaaagtagatctccacattataaaactattaccttacttatagctcttgtagtgtgggatgattaagtatttaatttccttggattaaaacaaagtggtacttatcaaaaaccataaaaaatctggagatgtgtcagagaaaatgtttataagcgtaaataattataattacaatgacagttcatgaaacatttatatttttaaaaacttggatcagtaatacttctaatgggaccaacttccccaacaacacaggaagtgtaaattctcaaatatcacattctttattttctctaaaattccataggaaagtatcaaatagcaaaaataaaatatttgtagtgtgtatactaagtttaaagacttatcagttttgagtcacacaacaaaccttggtggtaaattatatgatttgagtcacacaacaaaccttggtagtaaattttgtctccatgttccccactgaagaagctgaggttttgaaaacataagtgacttgctcaaggttacagagctgggaagctgcaaaactgaaattttaatcccaatttgtgacatttcaaagtcattgttcttcctagtatacaaactgccttcatttctttttataaattttgaaatattcattcatcaagtaagtggaggaaaaatttcatttgaaagtcacaaaagcctaccctatgtatgtctaaatgaaatttttaaatacccctctctctctcacccctgccacttgactcaggaaaccaaagagtgcaggatcctctgcccagcatctatggaagccacagaacattgtggcaggtgtgacttcaactttaccagccacatttgcactgtgataagagggtctcacaattccacagggaaggcatcaattgaagaaatgtgttcatctgccgaagaaaccattcatacagggagtgtaaacacgtactcttacacaggtaacagaaagcaagctgtctgcccatggcttaatggggttagtgagaagctgctgaaaatgcagatttatttcactctgacatcaactctccttaaactgatatcagtacattccatcatactttgaggccagctagttacaaggtaattaaaggcataatctggatgtattcaaagtcagtactttaaaatgtgttaaagtctatttaaacaaggttgtattccatattaaggtaaatctgtggagatatctgtgacctttactgctatatccagttaatttacaataaatccaatttcctttttcaaaagctgcaatgcagcttccactgaatgcattgaatgaatactgctatactcttaagcagaaagaaggatgaacctgtctgattaataataaaacctaacagtgctactctgaggatgaggtaaacccaagcatgacatttctccaagatggctggtcatctccaaaagaataacctttgcagttattgtaaatattaatttctatgtaccatcttggccctgctgaattagtccaaaatggttatgcttagttttggctgagctgtgtgagaaacactgttaagtttagaattatctctaaaacagttctgccatcaattaaatttgtgttattcatccatttacttaagtccctacaaaatgtgttcttgttttttgaaaaatcaagtttgtgtgtgtgtgtgtgtgtgtgtgtgtgtgtgtgtgtatcatctatcatcttgattcaatagaatccatttaagtgacataatttgagcaagctaaggttaataaacaagcaaaacattgctccattccatcatgaatcatcagtctgctttactcaaccaaggggcaataatggctaacctcaagagtgcagaaagtaaggcaggctactaagataagaggaggaagattaggaagggaagaaaggaacagagataaggttgattgaacattatttagtctcaatgttatactaggtactttaatttttttattatactttaagttctagggtacatgtgcacaacgtgcaggtttgttacatgtatacatgtgccatgttggtgtgctgcacccattaacttgtcatttacattaggtatatctctacactaggtactttaaaaccttatctcagttaccaacaaagcaatcatataaatatggtcatttaacagatgaggaaactgagggtcagatctgtaaaagttactcgccatgagaaagaaacatattcaaataatgccatcatcaaaagggacagactttgaagactccacgtggtgcaggagctcctttcagagtgctccaaatgcacttcaagctgttattccacctgaaatgtcctcctttatcatcctactcaaggcctaggtcaagattcttttcctcaatgcagtccctgtgctgctatggcacattgttcacaaagctcactagctctctcatgtgtcatatggatttggacacttgttccagctcttctattagattgaaacatccttatgaatagggcatttttgtttacctttgcctcgttatttggatttagaacactatacaaacaaaaaatatttcttggaatgaatttaattaggaaaggcctcagatagaggacaatttgtccaaccttctattgtgttcccagtcccagttatagatttaagtcatggactttcatttttaaattattgagtttccatctaagagagttctctacttttatctgccccttgtaatcaagatcaagattttgaagggcttttaataaatacttgtaatagccctctccagaagtgaatagatgtttccacctactgatataatgttatgagggcttttaaaatccatatttcagattgctttgcctgcagaaaatactacaaattgaatatgaaaaataacaaactgttctttttcatgaaagatgttcagcacacaagtggtgctatgataattccattgagaacaatttagattaagtcagactcttttagaaacttacacttgaaagctgacaataccagtgctgacaaaaatttattcatttatgcaatcatttatttatcaaaaattatttattaaatacctactaataactagtcactacattaggactagcagctatgatgacaaacaataatttttcattgagatttcaaccctatatgaagaaagaaggaagcagcaaatgagatttgaaatggtaatgtgggcttgaggatacagaataacagtcattaccaataagtagtttaatttgctgtagcagaaatgtaaaacatattgaccatctgagggtaggtagatggtctaggcaactgaatcgcacaaggtcattcaggtatccagaatccagaatggcaaccgaaggtatgcaattttctctttataaaatgatgtggaagttgtcagtgtctttctatactccttcaagtattgagatctgagtcatgtgaccactagaagctacaaagaaaactggcaaatgtggttttctaagcaggaggcctctgaccaggatggaagggagaactggggactcatggttgccatcacaggcaacaagtggcagatacccccgagcagaaaaaaatggaaaaggaagataatgctttacatttgtagagcaatctgcattttatgaagttctgccccataatttattgcattgtattttcatattagttctatacagtgggcagggaagggtttattgtaaggagatgtatataaggagaatgtctctccattaatctaagcatagagactgagaattaactccacgtccaatggagatgagcaggtggccaggcagccaaggaggaaggcctccttttctgatgctcaatctgagaaagagtcatccagaagctaacacacaaaaatacatacatacttacttaaaattcatcaaattagagacatggaaaataaatttaaataattaaactttcaagtaagtttttcaggggaaatgtgtagcattggtatttccgaagttattaaagcctaaatggaactaagactttggggacacaactgaatcacatgagtgttcatctaatacaatttttgccagtttggaaagctcagcaggcttggttttattgttttaataaagttggttggtttgtattttggttttcagttctggcttttgtggaagagggaaggaactagatagcagagtatgctttcatttttattcactaacatggtaccatgataaactaagtttcaaatcctgtatattgtaacaacattataatccatatgatttaaaattttttaagtaatattaacaaagtaacagaaagcaataatttataagttctatgatactaaaactataaaagaatgttgccaaacctgtctcatgtaggaatcaaaactacatgaatttgtgaagcactaaatcttattatacatgattccagtgcttttatttttcatttatttaatatatccctctttctctgctcagaaacagggaattctattctgtgcaattccgtatccctgcatctaataaatactttaaatgttacttatatttagaaaataaagatattagagttttatttatatacaaagcgtttagagcattaaacatttatttttaaatgtctaaagtttttgatattcacttttaatatgatggttaaaaaatgaaaataagagaaacttccctgtctattttttctctttccagatgtgaacctcaagccctacatgacatatgagtacaggatttctgcctggaacagctatgggcgaggactcagcaaagctgtgagagccagaacaaaagaagatgtgcctcaaggagtgagtccccctacgtggaccaaaatagacaatcttgaagatacaattgtcttaaactggagaaaacctatacaatcaaatggtattgagatacctttaaaatacaaataacaaaatcccataaattcataagaaaattgaaatgagtacaatctacatttaattgccctatgcatctaaccactagaaaagtatgttccgataaagggaactgtaattatgtgacaactaatcactcactttgtggtgtagtcctcgtagatttttagcctaaataagtaaaaaaatagaaatgaaagttccttgaatcccagaatatatctgagctgctttcaaaacaagcaaggcatattcagagaaggggaaagagttttaatattgaaagtaaatttgtttcatagtgaaaggaaataaacataaatgactcttatcatttatgtcaagaatccatctcctccataatagtataattaggaactgcttgagacagcaatataataggaaattaaaattaaataaagctatagtattgcatttcttccgaacactaagatttgtaagttgtttgcaaatagttaaaatgatatcacattcaaatgcagtcatttttctgcttcttttaggtcctattatttactacatccttcttcgaaatggaattgaacgttttcggggaacatcactgagcttctctgataaagagggaattcaaccatttcaggaatattcatatcagctgaaagcttgcacggttgctggctgtgccaccagtagcaaggtaagaggagtttgcctaaactctgggaaaaggggttcagtgtgaagattatctgaacatccaggttgtgactgcttttttcattgaagaaaacaatgtccctcctcaaagtggtgttaagtagcgtgttcatgtgtcacgttaactgagtgctaatacctatggctggaaggagagatcatttcaagggagatttatccaaatatcaatcttgtgttaatgaaaaacaagtgaaatcttgaagcagtaccatcttttcttccacattctttcctcaccaaccaattttaggtaatctataaatctataaaaatgtccaaatcattattcagttaaagaaagtttctatttaaatatgatatgaacaaaaattgtctgattttaaaaaatgaagagaagggcaaaaaagcctggcacggaaaacaaaattgttccaagccttctgctatagccttgtcaagaaataatgaagacctgaatttaggcagcagaggtcagaaccgagaatacagaatgatacaacagacatgggggataaaatctacaaaacttggtactcaattatatttacagaaataaaaggaaagagtcacggatattgtcaaatatctgcttgagtaatttgtggatcatggtgctattctgcaagcaaatttttaaaaaagagaaaaatgttgaaggtaaaagaataggattctgttttgttaagttttgtaaaaaatatatttaaagagaaggatcagatagcagggtggcggaagcagatagtacttggcactttatgtgaaaatatctggtcagaaaccagattgagaggtgactgaagtttctagaaagatctgtatgggaagttgaagtaatgagtataaatatggacatggaaggagaatagagagaaacaaatatggaatattgtggatgatgagcactggggaatgctaccaaatgaaaaagaaagaaaagcccacaaagaagactggaaataaacaatcaaacaatgtgggagtaaaataaagaaagggacatttcatagaagccagccttgacagaggaagcccaggaggaaacaaacttacacagagtagctctgattcttttcatatgcttaaaactttagaagagcaacatctttgcacactgtgcaagagccatccaaatgaaacattcagccacactgctcagccacagtgcaagaatgcaacattttgttcaacagacttctggaaacctttctgagtgagccaccatttagatagatagatggcagctgattggcccagtcaaaagttattagtcctagaacaattccatgctttttgcataggcacacttcatgcctgctacatgcaaagcaattgtttacaaagtgaaaaaagttaattctatgaaagaagccaatttttgtccaaaactatgttttgacaatattgactaagtaattgatttatttttttcttctgacttgtttctttctttagaaagttggtgcagacactataaagtcatcctaggtatcatgggaagagtaccgaaatgtctgcccatttattctgttcaaagcatattgtatgcaagcaagttcagatgtggcttttgctccatatttactggtgcttaaaatgtatgaaatcaggctgttaaaatgcaaagacactgatgggccatatggaagagagttatcaagagttctctagtaagacagtctgccagccagattttacttgtttaaacactgagggctgcactctgccgtcaaaattgttgttgaacctgttgtgataaatggtagtgtgagacttatgtaatatattcaaggtcagatttcattgtttaaataggttgggagggaaaaaaatgaaaaaaaagggaaatgcttctccaagcccctgctaatgatatgccaggccagacaacattttaaaacaaaagtgacattctcattgatcaggatagctagtgcactattacaataaattgctgcttaattcctacgtcttcaggtagttgcagctactacccaaggagttccggagagcatcctgccaccaagcatcacagccctaagtgcagtggctctgcatctgagctggagtgtccctgagaaatcaaacggcgtcattaaagagtaccagatcaggcaggttgggaaaggtctcatccacactgacaccactgacaggagacagcatacggtcacaggtgagaaaacaaaaaaaaaggaaatcctactggaggagtctgtcattgtggttaggggggcaaagcatcccaggggtgtgtgtttgatatatgaggtcacttcgaaaggacgtgttctcttgacatatggtcaggtcccacttatccatgctaatagaagagcccacactggcagcaatacgccacaacagcagataacttcagaaataatttatatttggccttgatatgcattatgtgaagggtttttgcatcagtattaactttttttttcaaacaaacagtaagatgcattttcattccccaaggatatactcatagttaatgggactaagatagccaagaatatactggaaggcaggggaaaatcagccagaggttaacatttgtctatcaagtggataattaatacacaggactagttgacagtggagtcattgtgactgtttgttactattaggaatgttaattaatagcaattgtgtttttttaatttattataatgtttattatcattagccttaataatatactattagtacagtacaatgatatgttagataattgctagtagtgattatgataataattaacaggttttagcttaaatgccacttctgaagggaggagaagcattttctgacttacttgctcgaataggttctctaacacaccaccacatcactttgttttatttccatcatagacctctcactgcctgatattttagtgtttgttttttgtctttttatgtctctccacacttgaatgtaggctccaagagagcaggaaccttatctacttgttcagtgttgtacctctagcacttatagtcctgaacacattaataggagctaaataaacgtttggggaagaagggaacttaatatgtgccagacgctgtcctaagcactttgagtgcactatgcaatttgattctccatcaccaacctaagatgtacagtgaattactaccttcattttacagaaaagaatactttgagaagttaagtaatttagttcattattcgagtctactgaatcatcccaaacaaccctgttaagtttaaattctaagaccatgggcaagattgtataaactttcccttttttcccattgtcagccacctccttccaagacttcctgagtggatgacctccttccattggactgcactttttgcagggggtgttgatagcacagataatgaaactcacagaaaagtgcagaaaggccttggaaaaatgtgactgatttttcctaagaagggacacaggttacacttacacagggtggcaaaataaattcatcacttttcactcttaaatgccacaattccctaacacataagcaagcattcattgacaaaatctccagtatttttccaaaagggccgtaaacctgcagaaggtgcttaatacaactcttggcctggcacattgtattccttacctcaagatcctgggctaaatcaatgatgatagtgttgaggctgggtgcggtggctcatgcctgtaatctcagcactttgggacgccgaggcagccggatcacctgaggtcaggagttcgagaccagcctggccaacatggcaaaacctcgtctctactaaaaatacaaaaatcagttgggcatggtggtgtgcatctgtaatcccagctactctggaggctgaggtaggggaatcactccaacctgggcggcagaggttgcagtgagctgagattacaccagtgcactccagcctgggcaacagaacgagactctgtctcaaaaaaaaaaaaaagataatggggttgggagaagccctcatatttgaatgatcaaaattatttcttttatcttattttacttgaagtggaaatcatcacaagtgattgaaataatggtgttttacataataaaaccttacttctatgtggtgctttatcatttaaagaaacgtttgcattttgacttctctgactctcatcacatccttgtaagagatgtttttaataatcatatctgaaagatgaagaagaaagccaacctactcagcgtatccaaggcattcactgcctgtatctgaaaggaaatcagaatatcatttcgttctcccaaaaatgaattgccagcttgcagttttccagatagtacactaagtggtctaaaataagactgctgctcttaagatcctctcacgtacagggaagactgacaagaaaagaaataactgaaaacagagctctatacaggatgcagtggtgaaaaatcaaatgagtcacttggagtaagcaatgggatgttaattacagggttttgaaaagcaagtttaggcacattaagactgtaccagcaaaggtttcacaataattgtgatataaggctaaagaaatttcttcttgtagtatctatcaacttaaccagcatcagcttcgaattgttgctactttattggtttgcattttttagaaatcagcatttatacaccaacagaccaaattcaattgtaatgttcaaaccaacaggattgatagcctcattaattataaaataattgcaaagatttttctctaaataacttcaccctaccagttcttcctttcattgacatttttaatggctatttttatgtcagagtagatttcatacatgtatcttggtgccagaaatcctattattagcataaatattttaaggttttttaatataattttaatttttacttaacagtaaaaaatcataatctggtaaaagcctttaggagtcctttgaccaatctccctgttctacttttgatttgttttaatttctatggatattgttttaaatagatttagagagtatttcacttgcccaatacagccctaaagaggggtttctttgtagaataaagaaataagtcctcattcagcaaaaccttaccaagtacagagcctcctatatgtagttctttggggacaggaatggtgctaggcattagataatcggaaacttgagatctatataatgttactcatttgcccaggaaaattcagttccacggttagctgactgaccaaatgtagtactgaagtattttatggtgtgaatgactgttttattgagttcatggaatgaactaaaataatcaaatttattttctgttccatcttaaatgtttgatggaaatgctgcctgaaccccctaggataaatgttttgattttctcatcatttccaaaagcttggcattccctaagcaacacagcactaataaagctgtagcactagtcgtcctggagcctgaaaatctaggtccttaggaatgacaggagggaaagggagcaccttgcctcggccccattgtctccatgcttatttttaattacctcaaagctttagaaacatgatcccgtaaatgctttgtgggaatagtggcgaatgcactcatcatgtgaaatccataaattgcttataatcctctcaagatgttaaaaaaagcattaagtaattgaagacaggaagtcctcggttaattatttagaggtgttatcaatgctttaagtaaactgaagcgttttctgctatctcactgagctgaataccatggggacgaaggagtagcagccatcatcttctcatattcgctaatgcaaacagcgcatggcagcttgtcaataaaagaccttttcatatcatttattactaaacacatccaccatcctgtacagaacaatttggacatcagttatggcattgtttcactttgggctacctctacattatacgtaggcctcctaatgtgagtttaggaatagaagaaaggattaactaaataattaaggccactgagaaaaaaatgaattagtcatgtcctgtttagcataacgtataataagggcctatgtgtctcttactctggaaaactattttcaaaataattaattagaaattactcatcattgcatttcatttaaaaggaaaaactcaccagcattaaattagcaaggaaagaataatttactttcgtttctcatcttcctagaagttaatgaaaactttgtgtgctaaatagaacaaaccctaacaatgctggttgtagcagaaaatgtaatactaatgttatactgaaacagataccttacacttcaccttggaaaaagagaaaacatactttaaccaccaatacaacaaaatgtagaaattctttgtaagggattttatttttagataactctgctatgtgttcccatattatctttgctctcgtagtaattatcacattttattctaatagcctttcctcttgtctctgttccacacttagtaataggtaatgctttttaagtacagagacagtagcttcctgtttgccattgtgttcctggtacctatcacagtacttaatatattcaaaaaatgtttgtcgaatgaataaatactgaatagtaaactagtatttgactacattctgttttgaatggagataaaaatgccactgtcaaacgtatctaaatcgcagacagatctggcaacaaaattgtggggtccagtgcgaaatgaaaattcaggccccttgttcagaaatcattaaaatttcaagacaatggaagcagagcatagaagtaagctcatgtgcttccaagcatggtaccgtgtttgattgcacagtcgaagcccacaaagccaaccctgatctccagcagtctggaattagctgcagtatatttctttaattaaaacagatagcaagaaaactaggatggtgataatgtcctcaaaaagctttgggagtttcttctatggttgtttgcaatgctccaggctgcattccccccagttactatgtaattactgaccaccaagcactggggacctgtgaaaatagagataagaatttgttttcttttcattttttcaactctgagaacaactaaatttgtgcctgaccaaaaaagtaaaaaaaaaaaagaaaaaaaaaagtgtggcatcaaccacttttttgtgttttaaaacctgcctattgataaaatattaaggccaaagaactataattgatagctgcctagacaatgatattttttaaaattccccttaaatcccagatattccaatgtactttgccagatactagttctgttttgtcactccagttctggccacccccttccctctgcaatgtcctcattgtctcacgtttgagcaacatcagattttgctgccacctgacatcacattttgtttttagagaagaaaagtctgcctggaaatgcagagaagaatcctcagtctagcataacactgaacttgaaagaggaaaagtatttattaaaatatttattaaaatactgtcactaaaatcaaaatatatatatcacagatataattcatattatatttttgttgttatatttattccagatatacatcaacattaagactattatttagacaccaccaaagaaaaagggtctttccttggtggtgtctaaataatagtcttaatgctgatgtatatctaaagagagtctgccaaagaagtaacttgtttaggaaaggcgtcttgggatcaggaagatattggagagaggggcctaagctatggcccagaatttcaaatgaaatatagaattaataacgcaagttagcttatagcaagtagtcagaactaaaagtcatgaagtgatcttactggcatgtgcaatgcaagagtccctttgttttgatgttttgatgttcagttcatatgaggtagcaactgaattcataaagcatgaatacagaaaatggacagtacaaatgctgctcaatgggggggaggaaattggcttgggtaagtggaatgggcagctgttgagattgtgaagaatgataccatccagaaaagatggctttagcatgtgaactcccgaaataatccttaatcaaatcctgtaaaacaaattctaatttaaaggtaccttagatgtctgtaaagtaattccatgatgcctttgtataccagttttgaacatctggattttcacagattgtcagattgatctaagtagaatgctgatatggctctatccatcacagtcaagatcaccaggggatgctggaagttcctgggaatctcagtaggcagagatgctccgaaagggatcacttagtgagatcccaggcaagtgagggcaaaaggaagcaacatcattatagttgtctgggtatatactctggggctcgttgtcttgcgccaagaaagaattcaggacacagacacatgtgggtgtgttaaggagtggaaagtttaatagaagaaaggagagaggagagcagctccttgtgagagagagagagaaagacagagagagagagagagagagacagagagagagagagagagacagagagacagagagacatccgtaaagtggggaggcagcggaccaaagcagattttacaggcaggctggagaaggcagtgtctgatttatatagggctcacagattggttcgatcaagtatgacatttacatagtgggaggggaaggctggtcaccccaccctaatcttattatgcaaatgggccttccagttgattggttccatcttgtctgagccttacagtacaagtggctgacaaggagaagggaagatggagcctccatcttgaacatgtacagtccttagttcctgcccacattcacccatgcaagcacccagcttgtttacctatgtctgcagctcgattttacatgcttgccctttgttagaaaattatttggggctttttactaaaaagaaaaggcttaccgaggactcccatacctttactatctgcctaagtgatttcttcttaactcctgtatcattagcaaggactgaatgtgagcagccgaggggccagaccacacatccagtttgggtgaactggtgccaggacagatgacttacccgcaggatggttattcacaatactttataagcaccaaacaaaaactttttaacgtaactcaggcctctcagtgcttgagctaatcactaaacatgctgatggaggaactcactgaattacacatcctttaggactatttggtaattctttagaacatagcagatgacactatagaataattggctgaatgttttgaagtagcacttgctatgtgaaattataatggctaaagtgcctttttttgactatttatcaagagattaaaaattggaagcaagctgttctttatagagtacatcaaatgttaactttcatagacatgggttttgttttccaaatcatatttttatgaactaaaggcagactttttgcagtcccttttagcacacatttactcttcaaagtaatgttacttggaagtgtaattgtaatgagtttggttatattatgcttctttcctttaaaaaagaacatgattccctgtagggaaattcaggtaatttgcagccacagtaatcttcactatactgaaatgttaaatacttggcttttctccatgtgtttgcctttctgtactctacaagtgctatttcctactcttctaattcaatgctgagcacttgaatgatgttttcttttctccttctactcttcgacttcaggattaagttacagttggaatggttcctttgagacatctctttatttccctcttctcatcctgatcaattcatgagtagttttcaattggtgtgccctttttattgcctgttgctagtatgtcatatatatctcattttaaggactaccgatagaggcttacttaaaatgacagcaaattccagttgaaatgtgttcattttattgagttttacagagtcgtatatatgaaaggtcatcaggttcatgtaaatcatctatgcctgatggtagttgatgctttcttacagattatctgaaccaagcctattagtaatccagtcctctaacaatatgaaaaatataaaaactaaaagatagaatatggttttaaattttctaaattatggatttagatattgccttcccttaaattaatctgtaggcctattaagcagtctctactatcatgcctacagtttatagatatagaaactgaggaacctagaagccagaaaacttccttgtagtctagtacttggtaagtagataagtattagaacccaaatagtctaatttcagactgctctcttagcacagaacatgactcagtatctcactacatgactcataataatattcaaaatgaaaatatttaaatatatagtcccacttgaatttttttttttttttttttttttttttttttttttttttttttttgagacggagtctcgctctgtcgcccaggctggagtgcagtggcgggatctcggctcactgcaagctccgcctcctgggttcacgccattctcctgcctcagcctcccaagtagctgggactgcaggcgcccgccactacgcccggctaattttttgtatttttagtagagacggggtttcaccgttttagccgggatggtctcgatctcctgacctcgtgatccgcccgcctcggcctcccaaagtgctgggattacaggcgtgagccactgcgcccggccgaattttttatattactggaaatttgactgggctttgagctatttatgtcatcgtttttgttataaggctgggaagcctaacccagttgctctgggccacatttctcagtgtaattgcccaagttccaaccttggcctcaccctttccttttctttctttctttttttttttaggcagtctagctactatgtcacccaggctggagcatagtggcaggatctcagctcactgcaacctctgcctcccaggttcaagcaattctccagcatcagcctcccaaacagctgggactacaggcatgcaccaccacgcctggctaatttttgtaggtttttttttttttttttttttttttagtagagacggggtttcactatgttggccaggttggtctcaaactcctgacctcaagtgatccacccgcctcgtcctcccaaagtgctgggactagaggcatgagccaccgtaccaccggtcccggccctttcttatgtctgtgatcataggtactttcctccaactttctgtgccttagcttccttatctgtataatgaacaaataatagcgtgcacagcagaaagttagtgtgggcgttaattatattaacacccatgaagtgcacagaagagggccaactagtagtacatgctcaataaacttttgctagtatgtcatttacataatcttataactaacttccttgaaaataactgcaattctcataaaatatatttagataatgtatagagtccaatgaaaagagaattaaaaacagaccaacaaaaacaaaaacaccctgagttttgtctgttgggtattttttttcttaatttatagtttttgtgctggtgtttgaactacattcttttaacttttttttttcgttttgagcaactacagtgtatacaattatgacttgccaattaaaataatattaattttaataaagagcagctgcaatggtttctaccatttttatgtcttctaaatgctgcttaatcttcagagggaaggcagccattgagtaacttaaatactgttagctctagctcttatgtgatggagaacatagagcttggtattcaggcttgggtcatctatgcactcctcagtccaggtgaagtcaacgctaaataaagtacaaagcctgatagtggacaaatgactggcttatccaaggaaaatgtgagttttgttataaaaagcaggaacagaccctggaaggtaaatatggcagatgtgaagttgcttgacacacattagcaaacatcatttgaaatgagcctaagtattactaccctttgcccacatggtccattaaactggtcagcatggctacatttcagggacagacacagctcttgaggataaagtgccaatgaattagagtaaaactgtcattctccccatattcacttgcagacatgtctcccactctcatcctcctggttcttcaatctttgtctcctttcctcagtgcaccatgttgactcctcttgatttgataatatgtttgaactcctctgacttcttgacgaaggttttctgctcagtgctgagtctgccattcctccttgattctagtaccccagtagcttcaagagaagcaaattccttccaccagccctacccccatatcctgctaggtgaacctatcccatctaatgtaaacacctgtagcaaactcctttgatgcactttcctccctctatcaaaaatccttaaggtgctggatgctctactgctgtaccatgcctaaacacctgccttctcaaattctaggctgtaagtaaaatggagaccactcaacttgcagcagaaaggctttgtcaagaaatgacaatttatatttttatatacattaattttcctttcagctacgattctcattacaaatacgcttaatcctctaatcaaccttagcaaacctctgtgattatgaattttcttttttccctaatgcccatcctaaaattttatttaacagtcactgcatgtctgaaatcagaccagccacgaccacaatgaggaagataactgaggccattgttttgctcagaatattcgagaaaaaaatttaaatatctgtttacttttagctaccatatttacatctggcattcaggaaaaaatctagaatatgtgtattgcccacaaattatattagtttctgttattttattaatattctgcaactaaaaaatatctccaactcaatgaaatcattgctgtggacagggataccgatggaattatgaggaaggacctttttggtcaggtcacatggtgataaacatcgtagcctcatatccctgcaatccttatgggacactatgatgggcatgctcttctttaagcaatatttgttcaacattgaatgcctaaaaatgggcactataggggaaagtgacctcccaaaaagactcgctcagtgatgccatttctactctcaaagggcttatattctaaatggggaaaataagatattcaggtaaaatggtatcacactggtcaagacccctttttgtcggtaaagagaatgaaggggagacattgtcgagctaaacgagtttgccactgcaacctctgagtttcattcttgaatgttcccttccattattttgagctttacattttgtaatcatagcattttccgatgagcttttatcaaacatatgtggcttgggtacggcttagatctttagtcatattcttcatctgtaaatcaggtaaatatcaaaattatgtaaatcctccaaagcaaccaaatggaagattgtaatcaaataagtgcctgcatcttatcactaagttgataaaaaaaatacaaagggctctgaagctaaaccttggagcagctccagctgcagaacattattgctttagcagagaacccagactactgctctcattctaaatggatgagatgggtaattttttcattcgtttaacgaacacacactttgtgcctgtcacaatcctaaggatacagataggcaaaacaaagttgttgttctttcagagcatacatctaaagcaggagacaaatatcaaataagcaagagacacagcaaacatcagagacggttgaaggctctgaaataagaaaattatgtgaggggataaaaagggatgggtggattgtttagataaagtggtcaaaattttttaaaatgtagtatttgaggagaaatctgcataaatagacaaagtgacacattaacatctctgaaggaacagtcattccaccaaaagaacaaaatatgcgaaaatgtagctcaaaatacgtgaaaaaataagcataacaatcattggattcatctgtaacttagttcaattatttaacaaataggctcagtcctgttgttttaaaatactatttttttctcaaagagagctttggcattgtttgaactttcccaagagtcaagagagagatgtcttgtaagcctcaatatcctccttgttgaatgctgctgagctttaaagttgcttctgctagaatgaaatactactttgagtatcctatttcatcttctcttgtctgctagatgctataatgattccccattttacagatcagtagaccaaggcaaagagaagctaagtaactctaacaaggtcaccagccacgcacagagcagcgaaatctaacaatatacaacttctattttagatggattgtcattcttttctccctgaaaacttactgaacaattaccatactgcatcatattctgaatacgaaagaagtaataagcaccatctcttctccaaattagctttaatctatgtgtaaagacaaaatcaacacacctcaaaaaagggcgcattagatacagtgcaaggtttaaaaacaaaagtgttggttagcgttaatatgagttgaatatggcttggggcaagaaaatgttggatctaaccttctttttattttcctgcccgtatttatataagaagcaattgcagagactgggatggttagcctggagaagagaagactcaggggggatttgataactgtctacaaacatttgaagagctgtcatgtggaaaagaaattagatttgttctatatgtccccaggggtgaaagtgatagaaagatttcatcacaatataaggaaggactttcaaacaaaataaggataactctaaggctctctaaagatgtaatgggctctttgagagacggagtgctctgatccgataggcaggacagccttttcaatgacatcttgtatagggaatcaagagaagggtggatggttcacatgaattttaaggtcttttctatggctgagaatttattagtttatcagtgataaatgaaattttgcccaatacttagcctcttatgaggttcagaccttctttaaagagtgttttagagagtactcttaaatgttttggctatcatatctacaactctgcatgttacttctggtacttaattgataataaataatcctcttaaggtgcactttatttcttgcttgctttttctaggtctccagccatacaccaactacagcttcactcttacagcttgtacatctgctgggtgcacttcaagcgagccttttctaggtcagacactgcaggcagctcctgaaggtaatgaaacaatatccatggtttgagggaagaaattttcacatagcattttgaggtggaatctgtaaactccttcataacaaataaggaagaggcaataaagttgataggtacaaaataaaatagcattctaggttcccattcttcaggcttgattcatgtaggtgtagcttcccaaggtcagttcgctttcaattctttaacctttatagagttgattttctgtggaaagaagaattattgaaatttttcaaaaactcagatgttaaatattttgggagcatctaatatataataagcaccatgctcactgctgaagttgtttaaaatgttctctgccctcaagactgacaatcaagtagaagtgataggagaaagatctgtatgaagagagaaaatctgaaagttgatgttaagaaagaacaaatgaatagagtgctaaggttggcctgaagaggaagagatagaaacccatcgatgacatcaaaaaaggctttatggagcagatgacttctgagatggaccacaacaaacaaggattttgacaaatgaacagtgatgtacagagatgtacaaccagacacagttggaaggaatgtaagatggaatcatcaccttagaaggcaaattgcaaatgtctatcacatttaaattgttaatttcccatgatacagctgttctattttcatcatttatgccagaaactgtgccacactgctcaaggaggcatgcaccaggatgtttattgaagcatttattttgtttaatagcaaaatgttgggagcaattttaatgtttgtgagtagaattgctaaataaattcagctattctcatattgtggaattccatgcaccagtataaaagaatgagatgatcagttcatacaaagaggaagttatgacattatattaatttataagaacaaactgagaaaatggcatttattgttaatggttaataaataaatgcatttaaaaatccaggaagtatacacaccaactgatagcaatggttacccatgtgttcagaggtgggatggctggtgtcatttactttcaaaagaaaaatatactcagtggcatgtgttagtgatcaactaattattttgttaatcttcattatctgcctatttttcatatggggaaaccaaggcataaataagtttctaaacagaaatgcaatgttaattaccaccatagactcctgaactacttgtccattactcttctaatgaaatggattgttgtacctcggaatattagacctgaacttcctaccagtaaatggggaataaaatggaaaattccacatatggggcatatggctcctcaccaggaattcactaatgatgttttctatataaagaatgtttcatgtcaaaaagcttagtgttcctttgaaaggaagaaaccagcagtggattttttggaaaggtaaactatcaaatggatactttgatgataatggataatttctaaaggatctatcaaccagatttggctgaaactcaacctgataaaataacagaatctcttgttccatttctctctaccaaattcatatatttaaattcattggaaatatgaaattttcccaacaaaatttcttgaaatgacttacattttatgacttaaaaattgtagctttcaacagtgcagggtaatgtgatatgagaaatgcccttgatttcttttttttttttaactttatgtatctttcctctaacacaaataatcatgcaaagaaataatagatgaaatggactttcctctgcagaagaaacatggatttagggccattttctggctgaataagtgccatttatatataacccatatatgaaataaatatagtgtgaatgcttaacttgggaacaccttagcaatcacattaagttctgttgttttactgtaaagtgaaaacaagtataccactttagattatccacccagacataactaattataaaatgccattttcgaagtacatcagatataatttgaagatctcatatttgagtattttaagtggacatggaaagaattaaaagaagtgtttatgcatagccaacgcaagctgagctcttttcacttgcctctcattttcaatctaagaaaaagtcaatgtacattacaacctcattgacaagttggacacagttctctacagttttatcctcatagaaaactgtgtacctgtacctttagtcaaataacaggaagattttgaattgaattattactctttttttctacaattactgccatccatgtgagttctaattcattttagagataaatcatgcaaaattgcagacatactttcctctagcattgataatgtggaaacagaaaggaaaagaagacccagtctttttcagttcattccagattcctcttcctctgcccttcttttaacgtttacacacccttggttttttcctctactctttacactatagcacccaggctcttctggaattttcgagtactggctttatctcctaatgaaggctgagagctaccaaatactaaagctctcaccaaagctacacttatggatttaaatcctatgtatttactggtctactacatgtttatatttaggtgtttttcaaaaactttaacctcagtacttcgccacttaattcttccactccactctactcctcaacttgcttttcttctctcaaatactaccacctacctatcacctaagcccaaagcttgacactcttgatggctcccttttccatatgtaatacataattttttataaaatctaattagttttaaatcttaagaattttttttaaaaaaattgttcttctttcccgtcccttttaacactgccttagttcagatcctcatagctataagaagagaagttctctggatcctcctaactaggatcccttcctctagtcatttttcctctttctcacatcccacatcctgattctttttcctcttttgacaaaataagaatatgtcatattattcacctccataaagtcccatttccttccaggaagacatacatccatatctccttagcaaagcaacatggacccctcaagttttaacttccatcaatttttcaaggctttccatcttccccacatgccatgcagtgcaccagccatgccaaggtatgtgcagtcctgccatccttgcccacatttctacgactttatgtgggttcccctcagcctgaactccctttccctacatcctcactcagttaacgctcaccttttcaaaacttggttcacgcatctccccttctggaaatcttccactacaaccacctacttcctacccatctccacttctccccacagtctgtgtcaggttaccctttctaagtgttctaacagctactgtgcctccttctcttaaagcatgtatcatactggagtacaactttttatcgactcatctttattcaccatgatacatgaactccatgaaggataagaaaaagtctttatcttcccatccacagtgcccaacacagaaaatgacacaaagtcgggtagaatgttgagtgaataaattaacaaatactaaattgtccagaattcagtgcatccctgacatcagctaatacaaaatttgttcctatcaccagatttcaggagaaaaacaatccacaataaatgctgggaattttgaattggaatgaagatttgtagggacatgagaagtgggtaatatggcatgcaactcaagataaatttaaaacaaatacagtagacatgttctacttgttgtcactgtgtaaaaaggcccaccaaggtttaattctacctttccccttttaaccttgcagctagtttaccccaccccatcctcctaggttacttccctccctactattcatttctttcacttgaactgcctcagtttgctcccttattatatagaataggtttttctggtttcacctgagacttaggccagagttacatggtgaaggggacaaattccccacctcggactcattaatatatctcaccaaagattgtcttactctagcaaagatttcttgcagctgccaagataacgatgtccccatatcaccatccaagtaaaaatgcagcactttctagttatatatacatttgaactccatattatcaatcaaaccaatgggcatggagttattaccaacttgaaaagagcttttgccagccggtataaataataaactcaacttttacctaaaggttgaaacaaacccaaaattatgtttcattttattttattagctcctccacatccacaggctttattgactggttcaaatcagaaaccaagcaatagccattctagtaccttggtgatttttaatacatcgttcaaggtgaaaaagatataactgcaggaagcagattatgaattaagattttatactttatcttttgaatcaacaaattaatatcacatttaaatcaaaactctgattggttgaatcatctagcagctgttggcagagaaacccacatacaaatgtgtactatgatttgtgaattttaccaaatatctagaacagagcagactctcagaacaaaatgaactactttcttctcaggaatatattgctccttagaaagttgggatgtttgagacatttttgaaatctatcttgtttctttcaggatgctgctaaataaattgcattttgttcttctgaaaatttttcttctaaaagtgtcaaaatcttaacctgtacggagtaacttacacaggagatacaatcaagcaaaagctattgattacagggaacctaatattgaaatgagttttttttaatctccagaagagatttacagtgtctaatcagagtataactagatgacaacataaagtggtaggactgaactttctcactgctggcttctccatcgatggatttgtacatctataagagtacttgaatgtttgacattgaattacagttgtttgtgtgtatattttattttttagacagaagtataaactccttgaaagtgagccacatcttagtcatctttgcattccctagaactgcctgcagtgcttagcataacattttgcaggagatatatttacaataaatctactcattaaacatgtattaggcattgtgttatccatagagatacattgacgaataagacagagaagatccctgctaccatggaactaactttgcatcaaagtaagagaaaggagaggactgcaccatcatataatgtaaaaataatagtatgtcaaagaaagaatttgattatgatgtcttgagtgttaagaaggaaatagaaaaggccatgcgatacagagaaactaggttgggactccattagatggggttcaagttagagttaagagagtgctaaaatgaggccttatcaataaggtgatagttacacaagtaactgaactatgagaacatatgagaacattctacatataagaacaattctacatatgagaacaaaatgcaaaaatgtcatgctgtaagggaacaaaggtgttccaggccaaaggaaccgaagttcaaaagcccaggtgtaggaaataactagaagcattctagggatagaaaggaatctggtatggccacagctctgtgaatggtgcaaagaatgctgccacttaggccagagccaataaaatgtgggaccatatgggtcacaaaaagaaattgggattatattatatgaataaattcaaaagggttatatggttcataaagatgacactggcttacatattcactttatacacttttacaaagattccaatggaatatggaaggccaagatttcgacatggaggcaagtttagaagctatgacaggagtttatgagagagagaaacgtggcttggaccaggagaagtgaaagtaaagatacaggaaagtatacattatagaatcttctgggctttatgttagattacatttgggcgtatgaaaggtgaaagtctcagggatcattatttttgtgtgttttgtccaagaaaatggatagatggacaagattgggaggtacatagattgtagacaggaaaaacaagagttctgttttgcatgtttttagtttttgatatatcatcagtcatccaaatggaggtgtcaagcaaacagttggattcttgagtctcacactcagagtttcaatctagagatatgcctttgggggtcttcagcatatgcatatttaaaacccatactgaatgaagatcacctgggaagccggtgttggaagagaagagaagagagaaaaagaagaagagaaaggaagagagaaaagcagaggggagagagagaacagagcatactgctctgaggcattacatcctttcaaggtccaggaggggaagagatcccagtaaatgaggccagaggcatagccagagaggaaaagagaagcatcacactgatgtgcaagaagaagggaaagtgcactcatttgttgaattgtataattcaggtacatactcgattatgcttactttcacatattccaggtaaattgtattaaaaagtttgaaatccccagatgatctctcaggccttgatttaaaatactctcagagtgacaaccaaggcagagaaattatccactgctagttgtctgacattcactttccaaaggcaattcaaaaataaaataatcaaagtaataaaaatatatttacaccaattatgtatttttgttccatacagttagatattttttaaaatcaacagaaaaaatatcacagttcatgggggggatggtgtgacttttgatacactgtttattttctcctaacaataaaacctcattgcgttattcttgccaggagtttgggtgacacctcgacacattatcatcaattctacaacagtggaattatattggagtctgccagaaaagcccaatggcctcgtttctcaatatcaattgagtcgtaatggaaacttgcttttcctgggtggcagtgaggagcagaatttcactgataaaaacctggagcccaatagcaggtaaactaaaagaaaactttaccaatcatacagcaggatttgtacatttctctgggttgataagaaatgcatgtcccactgaaagttgttaaattgtttaattaacttcctcattcattggccattcaataactgatgaaagtgctaaatcattcagtctttagacttcacgaaatttcttaaaaatataaataattcgtcttctgtttgacataaaagcatgagaatttttaaatatacaaaatacatgaagtattaaactttaaaaattaccaaattatcttcaaaaacacgcatccttgaactagcaataaaagagatgtaaagagttttgttttccgtcaactctcttttcttcttgtacagtgtttctctacttgctacaccacatatagttgtgaatagttttagaggaaaaagttccacatatttgcatttcattcccattcatttctcagcagagacaaaaacatatcttaaatcaacagatgttttactgtagaaagtagagatcaatttcattttattgtaaggaatagcagatcaatttaaaaacatctttctctaaacatatttccctgaactccaacctatttaaaaatggggaagattaatttgaatcctccacaatccaccagcacactccaagactttcctgaaatcttcaagaaaagctatgaattactagcaggttaaaaataaatttaagagcagctgaaattacaatggcttggagacaatgttgcctgtgcaagaaaaactaccaagtcaagtttctggaaagggggcaaagagtttgcaatttgtcacaaatttaggactaagcaattgatacaaaaactagtaatcattgttcaagtctcttgtgcatggccttaccacaattcttctttctttttaaatatagatacacttacaagttagaagtcaaaactggaggtggcagcagtgctagtgatgattacattgttcaaacacctatgtcaacaccagaagaaatctatcctccatataatatcacagtaattgggccttattctatatttgtagcttggataccaccaggtaaaaaaaaaaaagaagtatgtgtgtgtgtgtgtaaacattttaaaggaattaattagagataagaatagaactgttaatttagtaaatcagaaagacatagtcggtctcctggataaatatgaacagaaaaatctaaaccacacttctaagtgtatagacgcatgagtacatacatacatacgtagagatataggtatctagatgtcgatgtagatatgtaagtatatacagctttctatgaaagcaacactttcaagtacaagagactaaaaatctttttactcatctattttttttttttttttgagacggagtttcactcttgttgcccaggctggggtgcaatggcgcaatctcagctcaccacaacctccgactcctgggttcaaacaaatctcctgcctcaggctcctgagtagctgggattacaagcatatgccaccatgcccggctaattttgtattgtttttagtagagacagtgtttctccatgttggtcaggctggtctcgaactccagacctcaggtaattcacccgcctcagcctcccaaagtgctgggattacaggcatgagccaccacgcccggcttactcttctatatatccaatgcaagtcatataggtcagaattaccttgaacattcatttccatgggactccttagattggatcattgacattataccattccttttatattaaatcagtgaatggggagtttggaaagacagttgttcacttcacccatgtaccttgggttgtgaccacttatggtagctgcatttttcctctgtaagctgaatagccttcattgagccatttagtcattattgggttgccttgtgacttagtgcaacattatattttgaggtaagcaccatcctcaggtaaaatcctgactgcattaatactgtggagtaaagagtagagtgagaaaggacatatggaggacttttctttccaagtaaaatttaaaaatggttaagatgttaaaaacacttcaaaattatgtgactttatttttaatatctagtcttaagatgaaattgtgacacgccctttttgtcgccatcagaataagtttagccacagttcaaagtggcaccaaatggttaacagccatttgagccatcggtagatccattccataacataattaacataagcctatttttattgaattgaacagtcaaaacaggtactattgtatagctataaagagagcgtaaagacctaatacataaaacttaagtttcttatagaccaacaccttctgctataatctaagatcaaagagaaaaagttattttcccctaaaattcaaaagaaagtttacaaagagctttataagcaaagaaaaatataagttgctctaagatattaaatgtacatgatttcacccacttttgtttaaaataaatgtgcagcatattaaacaaaatataaaggaataattagtagtggcagaatgcatcacaaagtgctataatctttatgttgtaagagcatagatattcttgaactctgttcttaatttcgatagaggaaaagacatatcttctgctgtgggaaatatataaatttacagccccctttacagaatttatttctacttttgtttaattttatttatttatttatttatttatttgtttgtttgtttgtttgtttattttgagaccgggtctctctctctgtcacccaggctggagtgcagtggtgcaatctcagctcacagcaacctccgcctcccaggttcaagcctcagcctccaaagtagctgggactacaggcacacaccaccatgcctggctaatttttgtatttttagtagaaatggggcttcaccatgctggccaggctcgtctcgaactcctgacttcatgatccgcccaccttggcctcccaaagtgctgggattacgggcatgagccactgcacctggccacgattttttagtatatttctccttggcatttttattgtgctgttgtgtttttgcaccacaaaataaaatgaagctggatagagccaatctaataccatatttagcctattgacaagaaagttttagatttagaccagggtcttctacaatccaaattctccaagagcaatacgggaaatttcagggtgatgagcaaggttgatgatttctttgccatatgactgggaagtcccatggtttatcaaaatatctgttattttaacattatttaacatatcagttgccattgctaatctgaagacttcatgttcagtacgaatttgaaaatatctttattttatgactatgcaagtaagagaaatgaaaaagcctggattcatatcccaatactgccacctattagctgaacttaaacggtctctaggcctcaattttctccatctgtgaagtggagataatgatgatacctacatgtaggcaggtagggttgctgtaaagatcaaatgaagtaatttatatgataaatatattatctagttctatataatattctatagataccaatggtgattgtttgaagaattatttttttatctttaattgctcatttttaaaacgtatttgttccaacatttgctgggtctcaaagccccaattttcaaaataataaaaccacctactgaggattggattagtaaattttcaagacctctttcaaatttcccagcgtgtcatttttttctttgaattcaatatcacacttaaatgtttaatgtatcatgtttccatttagaaatgtatcattgtggaataaaacacaactttcacttgtttaatatgaccttaactctcacatacctcaggctttgtataaattgttcattctggtccagcctaggggatattgtagaatgctttacacactaactctgaccatttaaccaatggttaataaatctataatattcagacctgtcaatcttatagtttaagatgcacagaatccatttcagaaaccatataatataaggaaagattaaaatcttcaattaaatctttttcctggtgtctagaaggatttcaaactcagtaaacagtcagatgattttgacttgtgtataatctacagttgattttattggaaagtacctcatgctgtgttttgatttggataataaaaacatgtttctattcctgaatagtcacaaatatatatattttaaacagaaagaaaataaatttgtaagtggagattgtttatttgctcacaatataaagagttttctaggtattcatcatactccctgccattacaaaatgactacatcacagacagagctgaataatgggcaaaacagtccatgcctgcagttcccaaacctgaatgagcattagaatcacctaggaagcttgtgtaaagacagattctcaaccccaaatttactgaataagaatctcctgggatggagtcaagaaatctagagctttttaaaaactccacatatgactttgatgtgctaccaagtgtttttgaaatagtagcccagaggaccaaggaacagatctaggtattgctgaaaccaaatgattctgggagaacaatgtttgactgggtgtgtagtggcgtgccaagactagaagagttaattgtggaaaatggcaagccgctgaagggaaaacagccacgtgacagcaatgatctctgcagcatgaagaaactagtaactagaaagctttacctacccatccaaaaatctaaaaggaatagatgtgatttaccaaaaacatggatcacactcaccaagtgagactggtgaattacaataactgttttctctgaaaacatgagtccgccagtttctcttgaatgtctaaagcaagcttatccaacctaaagcccaggatggctttgaatgccacccaacataaattcaaaaactttcttgggatctttgcaattatttgttttagctcatcagctattgttagtgttagtgtgttttatatgtggcccaagacaattaatcttctttcattgtggcccagggaagccaaaagattggacactcatggtctaaagccaaaatactggctaaattgtatttgtttttttaaatatgcatttttttttttgtggtcagtgtgaacagagtaaccttagacaggtaagctgctgggaaaaaaaatgtctatgtggttacttggcaactgaaaaattacctaagcaattaactgaattttcagttttcaaactattgttctaatgctataaataaactaagccttagtacatgtttataagtcctactagtgaaagggtaaggtctagggaatagtgacaatacccaggggaagagtacccgtgatactgataacaaatgtcgtgtacatacgttcatattacttggtgtatttgccatttgttaaattcctactatatgccaaacactgataagctccttctctgccttacctcagttaatttttatgcaaacgctagaagacaggtaataatatcattatccccatcttaagataagaaattcgaatctcaaaaaagtaatataatatgctcaaggtcacactgcagagccaggattcaaattcaggtctactgtctgctactgccttttaagaccagttcctttctgtctttggcttaacccttaaatccaaatcgacttttcatttcttgaccaaagtctctcagatttatgatggatcaactatgatgtttgaaatagtagcccagagggccaagaaacagagctgggtgttggtgaaaaccaaatgattctgggagaatatttttttttaattttttttcttttattatactttaagttttagggtacatgtgcacaacgtgcaggtttgttacatatgtatacatgtgccatgttggtgtgctgcacccattaactcgtcatttaacattaggtatatctcctaatgctatccctcccctctcccccaaccccacaacaggccccggtatgtgatgttccccttcctgtgtccatgtgttctcattgttcaattcccacctatgagtgagaacatgtggtgtttggttttttgtccttgtgatagtttgccgagaatgatggtttccaccttcatctgtgtccccacaaaggacatgaactcatcattttttatggctgcatagtattccatggtgtatatgtgccacattttcttaatcctgtctatcattgttggacatttgggttggttccaagtctttgctattgtgaatagtgccgcaataaacatacatgtgcgtgtgtctttatagcagcatgatttataatcctttgggtatatacccagtaatgggatggctgggtcaaatggtatttctagttcaagatccctgaggaatcgccacactgacttccacaatggttgaactagtttacagtcccaccaacagtgtaaaagtgttcctatttctccacatcctctccagcacctgttgtttcctgactttttaatgattgccattctaactggtgtgagatggtatctcattgtggttttgacttgcatttctctgatggccagtgatggtgagcattttttcatgtgtcttttggctgcataaatgtcttcttttgagaagtgtctgttcatatccttctcccactttttgatggggctgtttgtttttttcttgtaaatttgtttgagttcattgtagattctagatattagccctttgtcagatgagtagaatgcaaaaattttcttccattctgtaggttgcctgttcactctgatggtagtttcttttgcagtgcagaagctctttagtttaattagatcccatttgtcaattttacctaggcaataccattcaggacataggtatgggcaaggacttcatgtctaaaacaccaaaagcaatgggagaataatattttactgggggcatcaaaaccagaagaattatttgtggaagtggtgagcccctgaagggaaaatatccacattgcaacaatgactttttgcagcgtgaaggaagtagtaaccagaaagctttacctacacattctagaaggaatagacgtgacttaaaaccagattccaggtgtaggaagattttagttaggtgggaggggaggagagtcacttctcaaattgctgtaaagagatcatccaaattctattttaaagccttggtaaatattcccctgtctcccatgtaaaccttcatccactttaccttattctttcttgataaatgtcagtagtaacattaccaaaacactctaagctctagaaaatcaagatctctagccttttgtgtatcatttgaacctctaaatcaggtgacatacaaacaacatatccttataaaaattttgctgaattaatggaggaacacaatggtgagcgagcctccacaatttattatgcagtcaaatgtaaattgtggatatcctgccatttaaaattactcaaacatttgattttctcttaaagtcatccttcgtctacattaacttaatcttaaacagagacatacacacaaagagagagagaggcagagagacagagagagagagacatttcttctttaatgacaaacagagcacatacacatattttccaaagactgcatcttgtcttatggatgtgcaattttttcacctttcagaaaaggtggtattgttttctaacatggaatgggcttcactatttagttgtcctctggccttgggcaagctgcacaatgtttctcaaattcaggtttctcatctgtacaaggagaaattaaatgcctaccttatattgttatatgaagtaaatgagatggcatggtaaaactccattattgtttgaacctttaggtaatgtaaacaaccttagattattcctaagcattccctctcaccttttaccagctctcaacattgggtcaggacttttgtattcatattaaagagaacatttatattaaagagagcaaaggatatatgttaccttaataggtgaaaaattatggaaaattaaatagcaaatgcttcatggaacataagtggtttactcagaatgacaatggagatagatatccctgctgtttaagaatctaaacattcaaaattatttaaactctgaaggtaataatgagtctttctaatttatcgagatgatgactatattttgaactgttctagcccttaatcatgttctaattaacaatgccattgcatttaacacatactttttctcactaaggatggtgagtcatttaggtttaacgtacaatatagaaatactggtgcttttcctttaacattaatatcttactccattaaagaaggaattagcaagaattctactgataaataatttttattaatattgctctagaaatacaaatttttttatttatcattttgattaaaggttagctggccataatatggtctatttatggacattagacatcttggcattcagttaactcatcagctgcagtgtattatttcagatactatgcatttaaagtcaaaatttacattaatctttctaaaggattcacattacattaattgggatgattcaacattgacagttgtttcacttttcttaacttataaatgcaataaccaaatgacaaggagtggtgagtttcagaagaaaatgtgaaactcacttcagtggtttgtattttattttggatattttaaaatgtatctttcattactgagctttaatatatgctaggcattttgctaagagattaacatatatctcatttagtgttcataataacttaatatagtatgtcctattgttttgctcattttactaatgaaaaaggtcaatttagacactccaagctattttctctaggttattcttcaagcaggtgtcagagcagggctgaccctcatgggtgtgagtccaagtctgactcaaaactactattctatattttctcaatatttttccacctaaacgtgcggaaagcaaatgatttttcatgagttctactgtaatcccatttaaaagctaaaaaactgatttttgctttatatataggaagtatgaatgaggacaatgtaattcaggatcagtcgacccagtaacccaatagaataattttatttgtggctcaaaacttcatgagatgtaattcatttgcctttgggtatattgattcctctagtcatttaactaacgtggaaattatttctgagccccactcaggggcaaaacatgatgctggacaccctaaaagttacaaagaggaatgagacactgtccctcttgtcaggaaccctaccatctagtaaggtagaaaagacataaatgataactattatacaaccaatgttaaatttccatacaattggtatgaatgagttcaagagggtcccgttttacttctgttcccccaaaaaggcctaatcaaggtttccctacctatacagtggagaatttagctcgatttgttaaaagcaccatgttaagtgcaaccaagtgttttgaaacaaatgcctctatcaaaccgaattaatagtttttcctcttagaatttttcctgttccagctcctaaaaaaagacttaaaaaggattattgattgacttgtcccattgtaaagtatgcacctgctgtgaaatgaagccatggagaaaaatagttgaataatttaacttttttatttgtaaagataatcagggtttttctgattacatcttaacttcataaatgttaaataacctatcagcatctagttgttgtaaattatgaaaaggagcattgcaaggaatattaaccaacgaaatccttgttctttagtgaacaagaaaatgtgttatggcagcttgtcattgtgcgactggtaactttgacaccaaataacaaaactgccatttgcacttagggtaaattggttcacttgagcttccactgctcctcttgctctgacataaatttatgaactcaggaactaaccaagtcgtgtggcttcccagctgactttaacaaatatgcccatttcatttcatttagtcatcagaataccagggggctcagtcatttcagactcattgcagatggtatagggtttgtaggaacaccagagactttcgtgtcacagtcctggaaattatgatagtggagggggcccactttcctaaatgcatgccagtgttttacgtgttcacagcttagaggagcattttctgtttcagcacctcataggtatatgtaaaggacatttatttccaattaatgaagaggtgaaaaatacattttctatgctcatggtttggctagccatgtttaaatctggattaagattatgtttatatttgacatgcggtagaagcacagttttgttccttcatcctctgggagtcctgtcctttttataacagaagttacttcttgaaggatgcaaggcctggaagcagaacagtaggtacagactgaagacataaagtaaaacaacctcagatgaattggagggaacgccactccaaattactgctaacaatgaataatacagtattttcgtaggaatgcaatttgatcatatccaagtacacataaaaaataaaactagataacaaaatagtgttacaaagacattaacttgaatgaatgtaacatttatttgtagttggaatagcaactttatatgaaagatggattcaaaagtgtttgagggcacatggaaacagtgccatagttgttttttgttctttatttcattttgttccattttgtcttgtagagatgtcagccatttattaagtactttctatgttatgggaatatattgaaaggcttacagatattttctaatttaatcctcacaactctctatgaggtagctattagtatcatcattttacacatgaagagacaacatccatagaggttagttaatttgccagtggtcgcttgggaaataagggcagcagaaggatttgatctatctgacaccactctgtggtttgtctagttcaacaagaatgatggcatgtttcttatgaatgtgtgtctgtcaaacttttctgcaagaactgtcctaggaacaaagaagacaggatgaatatgcaatcccaggaggtctgaaaacagagcctgaagcaatcatcattagcttgcagtttctttaaggtcttgctttttatcttaaaaattcatgtaaatttgccattgtattccagtgtttgtcttcatccaaaaaataatatattatacaacttatcatttgggaaaacattttctactaatctcattggctaaagagtgataatgctgttatatttcatgatattaggaagatctaaagaaaactaagcccaataacaggttcaaggtcccggcaattcttcccctcttcattttgtcataaatatgtgggttcaccgtgaggcagaggttgcagtgaaccaagatcatgccactgcactccagcctggtggcaaagcaagacttcgtctcaaaaacaaaacaaaacttgggaggccgaggcgggtggatcatgaggtcaggagatccagaccatcctggctaacaaggtgaaaccccgtctctactaaaaatacaaaaaattagccgggcgcggtggcgggcgcctgtagtcccagctactcgggaggctgaggcaggagaatggcgtgaacccgggaggcggagcttgcagtgagccgagattgcgccactgcagtccgcagtccggcctgggcgacagagcgagactccgtctcaaaaaaaaaaaccaaacaaacaaacaaacaaaaaaaaacaaaaaacctgtggcttcaaacaacagccttttattcctcactgctttactgttatggcagggtaacaatagggagaaatgcccaaaatgtgatatggaatgctttgtcattctaggatactctggatggaaatttctatcagcatatcctcctgctgaaggtcaaattgcaaactgagagggtccccgattccttcttcaatctctcttaccacctcaagcaacaccctccaaaaaatactttttgcggagaggaagaagaaacctgattatattactttttattttacctctggcacagtacttaaatttttctcatccattaatgaactgagtctcaaatggtctctataatcaattctccttatccagctctcaaatttcattttaattattgcagtcttgttgagagcagtaaaaactgccagttttgtcgtggagtggtgaattaggcctcgaagaatagcctttaaataggcctattatgtgtattcaccataccagtaaagagaaaaataaagttattttttaggcatttaatttttgttatgatatcttttcctgtttctttatggagaaaaatagtatagaactctttattacctgaaacaaagtggaagtgtcatgggtcaggccaacttttcatcccatgtctagggtagaaaatccacattgagttcactttaaagcaatagcgagagactaacattacattgtcctttggttacagtatgaacagttatacttgttcagcacactggcacatcagcataaacattttcttgtgtcctacagttggttcattctgtggtgactacagagtcttcaactctacaattggctagcaaaaattctaatcactcaccatacatacaattctctaatcttgaacttttagaaagaaaaattcacacccaatttttgtgaacaaagaaacggggattctgctggttccccttcctcaaacagggaaatcctgtgtttcccaaattttccatatcaaagtgatactccaaaaaaaggcacagtaagtccttaaggtcatgataggttcttggaaactgcaattttgagtcaaaagatatataaggaaaccaattttaccttaggctagttgatataagcaagatttaagttgcaaggaatatttgtggtcacaaaaacgtcaccaaactaaatatcatcaaagaaagaccaaaacacttctaatattaaactgaaataaatatgagctatacatacatttaagaaagattaatagaaacaagtaagatcatttttaacctaagttttggcaagtcagcgagtgacaacagccatagggataaatgtttttgagcagaaattagaagaaattcttcttaccaccatgcactagtaaaaacaatcgcaagtagggcaagctcacagaaggcttttgtacagcattatttattattatgcatctatatgatagtaacacacttaatgaatctttactttacaattattcattcattcattcattttctgacacaccttttccagttcagggttggggtggccagggcctaaccaggcagctcaagaccattccgttacagggcacacacacacacccacactcgctcagactaggaccattcagacacaccaattaatttaatggaaacatctttaggatatgggaaaaatccagagtacccataaagaaaccacgcagacatggggagaatgtgtaaatttcacatagacagtggctccagctgggaatcaatttttttcctcataaatattaatgaaacaatgttgaatgaaacaacattattcgaggacctacggtactatgtttgttcctgtctttgaatatactttgacatgagcccacaaacctccaaagcaggtgtatttcaggttgggatacttggtctgcagaactttaaatttctacctataatatgcttgttccatcagtaatgatttttacttatccatcatttgtttccttgcttcggaatagtctccaagaatggctctgccttactgcacaaattttctcaaacctatcttgtcatttttccccaagttgtcctactctaagactccattatcaaggaaaagcataagtatattgatataagtgttgatatcagatgggcctaagttcaagtccttgcttctccaattaatcagtgtgcaatctggaacaagttatttaacttctctgagttttagttttctcatcttaaaaaatagtaatatttaccatgcagtattgtcttgagggttcgttcattcattcaatcagctaacatttattgagctgctactttgtgctaaagtctaggcagtggaaccacattggagaaaacaaagtcctaatttatacggttgacattctagtagtattaaatgggataatgcgtgttgcctggcataacacagggatgcattgaaatgactcttgtttgtactacttctgcaaacattgtaagactttcaaactggtttccctatgtcttgtctctcatgtttttaagccactattcatttcccaacagtgttatcattctaaaatataggtagactcttattttcttatttatacctgcaaagtctccttgttgctgattatatatgaagcccaaatttctcaaagaattaattgataaaatttagtagtcacttgagttttggagtgaagaaggcaggatccactctaaaagtcttactctaagatttccatcctaggaaaatgggaagatggtattatgacttactgaaagaggaaacctaggaaaaagaacaggtttgggagtggaaaatacagctagttctgttttagaattgttgagatcgtggcctctgaggaatatccatgtagaaatacctagcaggctgttgaaaatacaaagctgtaataccggaaagatagaaagctagagataagagtttaggaatcaatgatagaatgttagtagtttaacctactagaataaatgtaccagatagtttagccatgatgctctaaatttaaaataaacattctcagtctaagctgccaaatttaacgcaatctagcacctttcctgaggaagcaattgatcagtacttctgaagatgatcaatatctccttcagacacctctttttcatctatcctacacaaaatcctgagcatctttggtttgtaccagctcttccactctgtaaatacagaggccacatctataaaaagcaaaaccacatttcattctttagacctcatctctcttaggtcattgagtcctgtgcttcctcagtaatgttatctctagattccactgtttctaaagtaaagatagacttatgtgggtactacagaagtaaataactaaactcataaatgttaaaaactctcagatcaaggagacaatgtaatagaaaatgccattatattcttcattcaaaactcatatcctctccttgaaaaagtatgcctgttgttcatgaccaaataaaacttaacaagcatttaattatataaatagactttgacgaggctaaactgacaagacctactttctttaggaaggaatggtgaaaaatgacaattgttgaacccaaattttcgctgtatttagggccataagtctcactgacagtgaactgtcctggcccaataattaatgcactgggaattctctaggtagaccatgatttggatatttcatgggctatgtcaaggatccatgtcagacaggaggcatacacaatgctctacagaaaaattattgtcacaagcaaaattggtgttgttttctatgaactttaaaagtaagtaaacctagaaaaaatataggacagcataattgccttatatgttttaagtgaaatgtgccttcatttttatttgccaatagagtatatctttaaatagaaatattatgcttttaaaaatagattatgtacatttcttacttttggaatacacaatctaatatttgccaacttaacttttgtgaagcttttaattgctatattaaaaagtaatttacttttctattacaactttttttttttttttggaggcggagtctcactctgtcgcccaggctggagtgcagtggcgtgatctcagctcactgcaacctctgcctcccgggttcaagcgattctcctgcctcagcctcccgagtagctgggattacaggcacacaccactatgcccggctaatttctgtatttttacagggtttcaccatgttggccaggatggtctccatctcctgaccttgtgatcagcccacctcaacctcccaaagtgctgggattacaggcatgagccaccacgcccggcctcaattacaaaattttaaatagacattatttttaaaagacaaacatttgttgcccattctgttttatttatatatatatgtgtgtctatatatatttatttatatatatatgtgtgtctatatatatatacacacacacacacacacacacacacacacatatatatatatatatgtttttaatgttctctctctctctctctctttaaagggatcctcatccccgaaattcctgtggagtacaatgtcttactcaatgatggaagtgtaacacctctggccttctccgttggtcatcatcaatccacccttctggaaaatttgactccattcacacagtatgagataaggatacaagcatgtcaaaatggtgaaagtctttcagacacttggcctgggcttttatgaaaaagtatttcattaaaaaatttcattaaaaaggaatacattctcagtccaaatataaagactaacgtttcacttcttatttgtagtggactgtttacccagaaaaatcacagtctggcatcgagtaaagcattatgcatttctgcacattaaatcataaatatttaaatatattaaaatggtggttttgcaaagtcttgttttataaggccctttgaaagaaaaacacctagctcacataaaggagtctttggtaatataaaacaaaaatgagtattccaaatatttcatagaaaacatatttaccttggccttatttaaattttatccaggaggaggaagtgagaagttatttaagagttgaattacacccaaatgaatcctatatattttatagtgcttccttgaaccctattcatatatacaaactatcaccttgtgtttcatggcttaggctgtggtcagtgaaattttcatgtatctgtgttgtgttaaggaaaagcctcccccatttcctttatcactccaaacggataagtagctaaatgtaaactgtgatttaggaggggagaacagggaatcaagagagctatacatcattttatttatctcttttaaattaagtataaactttaacagatatggatatgttatatatgtgtatatcatatataacatgatatatgtgtatatcatatataacatatgatatatatgatctcatcatatatgttatataacgtataatactcatttgctaaataaagaaaacatgtaacttaccttagtataaaaaacattttgcttcaccttaaagaaatttatcagactcaatgtgtagtggaaactcctgtattgaatgtccttaggaatttctgtttccaaatagtgctagttctcatggagttggttagaattatgagtctgcaattttgctctgctgaactcatcagaaatggctagtcagtttgtccttttttctctaaaaaatagaccatggcatttttgtttgaggggtattgctttctctgatctgtcttcacctgataaacgtgaaaataattttaaattaatgttttcttgactcaagtacaaagtcaacgtctgcatctccgtgtccctgaaactgtgcaatggaggtacaatatccttcaaatagattgttttattcctgtgtgtttgaataatgttcatgagtttaaaatattggcaaaataaaatattattaaaagcatgcaagatgtgtaggtcacacatacacttgtgaaattcaagtgcattatcactttctggttagaatgactataataaactagagaaacttgagttcagacaagtttccttattattccttatttccagacaatatgccttattgtttatgtctatataaatatgtgactaattaatgggttttccaaaaataattttctatttaaatgttcaaatcccataaaaatttatttaaaacacatgtacaagtatatatgcaaaaggacaggttaaaataattttcatgatatcattacccttctgtatgaatatgtagttcttttccttgcttgaaaaataataaagacctcaattttttttttttcaaggaagttgtggagttagcagtaggatgtttgtcaaaacacctgaagcagccccaatggatcttaattctcctgttcttaaggcactggggtcagcttgcatagagattaagtggatgccacctgaaaaaccaaatggaatcatcatcaactactttatttacaggtaagattggctgttactattatttttagttatttaagaatgcgtactgctccaacacagcagaatcaagagcattttatatttccataagagaatgaatgggaattcatgttgtgtttttttttgttttgttttgtatgtttgtttgtttgtttgtagcacctaccagtgaggactaagactggtgctcaaacttttacaaattaaccaaggaaaaaagccataactgccatataacatttttgattgagatctgtttgaaaactgagaccttatagcccacataggcttatatttagtgatggggcagaacagtcctctaaagcaggggttcctaacccccaggccacagagtccgcggcctgttaggaaccgggccacacagcaggtgagtggctggtgagcaagcattaccaccggagcttcacctcctgtcagattagtggtggcattagatactcacaggagtccaaaccctattgtgaactgcgcatgtgggggatctaggttgtgccttccttatcagaatctaatgcctgatgatctgaggtggaataatttcatcttgaaaccgtacaccctaactgcattgccccagtgtgtagaaaaattgtcttccacaaaaccagtccctggtgccaaaaagtttggggaccactgcttaagcagctcactgaccaagaaaacatagtctttccagagaggaaaccagatacaagacaagaattctaatatttctcattaattattatgtagagattaaaaagttttttctcctcctccaaagatggtgcttttcataagcagaaaaaggggctctcctctccagttttccttctgttttaatgagcctccactccactggttagatggtgttatagcaacttgttccatcatgtgcagaatttattaagtgtacctacctaaaataaagaaaagagacaatagggaagagaggaagagaaagattgaggaaaaagagagacaaagagagattgagagagagagagagaaaataatggaagagagagatacactatgaacattttggtttgaaggatattttgctctctgatctagtcttcaccagatcaacatgaacattgctttaaattaatgtattctttaaataaataatgaatgaggaggagaaggagcaggcaaaggaagagaatgagggagagatggagggagggagagaagaagagaaaaaatagagaaagtgaggggaggtgagtagaaagtacaatgcaaagagccaagggggcaaataacctgtcaactgatggcttgctacttaagacagaaaatacaatcattggtagacatacaggacttgcagattgaaaaacccaatcccattctgaaagcaatgtatttcctttagcgtacaaagcagaacacccttcttctcagatcctcataccccgcacctcttcaacatcctttgttagtgtctctagcagcctcaggccttcccttatttggtcctatgccctggaaacttagtgaaacttacttaggctcctcttataactttagatattgaaatcctttgattcacatcagtcttcagtgatgagctaagggcttatagaaaaaaattacgaaaggagaaagtattattgcatttctggttatgtaaatgacattaccaaaaatgaacaagccaaatttcttctcagcaaacattaatttgaagaataatatttctgattcaaaaacacatgaacacgtaaaaatggttaatgtgaatttccattttacgctaagcacattagtgcaggctctaaaatgtccaccctcttgaaatagttttctttcatccacttaatgctaattgcatgagaaaagcacatcaaattcctattcagaataaagggaaatagagtatctgttatagaccaggacgtggcttcactctgttggttttgtaaataaagctcgtgattacagtgcctattccatggcagctatagagagggaaaacaggaaatataatgcagaaagcccgcttcaatgaaaaatactgtaaattgaatttgacagcatttgatggcatctgattattctaatcacagccaaacaatgatataaagagtaatatgaaacagaatgtgttactgcctagcagactcaaaagcaataaaccttcctccaatgtgacacaatcacttcacaatcataattgtagcctgtttgatacctctgagtacagcagaagggcactgactgacatagatacattttgttttttatttaaagtgaaatgaaaatggcgcactggggctccagatacaatcgttatattcacctacataggcatgaatcacttggcagttatttcaactgaagtttaaatgtgcttagacaacaacaatatcaaatttttcttagatagctgcaaaaaataatcagaaatttgtaaggacagaaatagaatggagacacatagttctttttcattctgagactacatagagccctttatatagttatagccaccagcctgcagtatttctgaggaggttatggcatgtaatttcagcttcatcattggccttctctttcttctatcggcaccaaaggaagtacatttagctcaaaccaaagataggatttggcctatgcagatatttttattaacttgcaggaagcccacttgtaaatctcatttgaaattgtttgccactctcttctcaccaagaccctgaatcattttcttttctgtaactgtcctttattttttaaatatttcctctagatattatcctattaaaaaatatctgacctaataaagacagaagatgtttatgacttcaaaaacaaagcaaaataacctaaatattatcctattaaaaagcgtctgccctattaaagatagaagaatgtttataatttcaaaaacgaaacaaaataacctagtaagaacaaactattaatatgattccctctgcttagtttatctgtttaagctattttgttgactatatataagtcacaaaaaaagatttgctacaaaaagttttgtaaagaatagagaccaacatttaagttagtgttttgcaacctgtttattgactgagtatagacaagactgtcttggacatctgcttcctcctctcaatgagtttggctggtatgataatgattcttcagtattccccctttattttatatctgcaaccttgcaaatggcaaaaatctcatcacttacgtctacaaaatccatcaaacacattaaattgagactttacaaaacatgtaataaaataatctcctcccactaggtgctttaattttaatagaaaccaaatttcatggggtttattattctcatgagctttctctttaaataaataaaaagatttgatcaatgtgcactgagaggcaaaactatatacaaacaccctgtaaatgctgtaaaaatagaaacaaatgatggcacttccttctgagtatttagtaagatttaaaggataaaatctgaaataattttgaagactgtatgatatgaaagggttttcaaagcagataagtgaaaacattttataaaatggataattaagctgattgaattaactaagaaaagacgagcattgaatcaaaggcaaaggaattttgatgtaattcaatttgtattgggtggaaagatggatatagatatgaatatttatatagatagatacagacagaagacagacagacagacatctacctatccatacatgtacatatctactgagagagacacaaagatctatgagacctaagcccttttaccaatgatcttcactacagtgggagatataagacaggctaaataaacaaagaaaagagtaaaatatatagtggaaaaacagaaatatttaccagaaaatttagagaataattctgtgtctagaatattcatggaacacttcatcaagttgatgtcattgagactaggacttataaaataaagatttaatgactatttaaattgtaagagaaatacatttgttagaaaaaatgttttaacagtacagaagattactaaggttattattcattcttatgatttactcatggcatatgtaattttcactaatagaagtaacactattaattttaatatattaacattaatgttttctatttgtattttcttcttcatgaaagaattatattgcccatattgttctgcaattttctttgggcattttatatatatgcccacacacatatacacacctaatttcttttaatgactcatcaatattctgttatatggatgtgtatcatatattatttagccagtaccctgatgatggcaagataggtgattttcaagttttcgttaccacagcaattctctaataaatattcttacggtaagtatacagagaattattcttagtactagaagtactgggtcaattaaaattgttgaggatttgtctttactagaccatatgcatttaaaattgttgaggattcctaagttgtcttccaaatatcatatgtaagaatttctaattctgaaatcttttaatacagggtcagtcttccaaatctgtcagctcaatattttcatttgcacatttttgttgttttaattcaagttttgatgattataagtaagattgttcatttacttaaaatatttatcttctatttgggaggggtatgtataatatattataaattcttagactaattttttctactggattatttcttattgtctatattctttccacattaaagaaaatctccctttcatgatcatattaaaaataacacattaattatttcttccagcacttttatggctctactccttatttctaaatatggaattaatattgttattggaaattagataagaattcattttcttaaaaaatgctaactagtttatcaacattatttcataatccactgatttgaaatgtcactcatacaaaattcctatgtgcatcgggttcattttaggactttgtattctgtttcacttgtggtaaatagggattttaacaagtacagcctgatggtgaagacatgataagtgaataaaatcaatagaataagcaaaatttccaacacataagcataggattcaaggaatggtcaggtttatctggagtcattgctattagtaggggacatttagaagatcagcttaatgatagattttagatctaaggagtttaggctttatattcagaggcaatgtgagctgctgaaggtttagggggtaaatagagaagcaatgtaataaagtggaaagagtgtggcatttgtagtcagaagatatggcttccagggcctggctctaacacttactagttatatgaccttaggcaagtcactgtgttccctaattttccatttttacatgaagtgaagatagtaaatataaaagataattagcctcttggaattctgtaagaattaaataatatgtgtggaattactgttaaatgtgaagcatgataaaaatagaaagttatcctagatatgttgtccaaagccatgttttagaaagacaaatccatctggcagttatagatgtacatttaaagtcaatgaaagaggttcatggttataaaagtagcagcttgcataacagtatgcctggtaggattctgttttcctttaaatatatagtatattttttacatatatatgtatataaaaaaatgtctggaatgttaaacaccaaaatagtgctagcagtgcttatctccaaatattaggctatcagtgattcttttaaatacttctgcttttgttcatctgtgttttcttattaatttttatagtcaatacatcatatggtctagtaaagacaaaataataaatttgtgagcccagatgcaaatctatcatcactgtctccgattttcctatttccttctttgtgtgaatatcaccatcactttctgtaataatcaaagtctgatcaagaaagaggaaccacactacttactttaacagaaggaatttaatataaataattagtaagtagttataaatttgttaactaggtaactaaaagcataaaaagagaactctaagatatcatggaggtggcaactacaggaaacagctagcacctttagaactgagggaacaaaggggagttgttagaattattaaaatgtaaatgcatagaggagggtgcctgtgaagctgggactcagacagttgaagaggggtacctgccactggtgcagttgtatggaggaggaaacatgaaattaagttggttttccaaatgtcggaaaaattgcatgctgcaatcacttgctcccaaggtatttctttattgcaacacaagaacagcctaatacagaaaactggcaccaggagtagcgtgttgctatgaagatacctgaaaatgtggaagtgactttggaaatgggtaacgggcagaggttgaaagagttgggagggctcagaagaagacaggaaggtgagggaaaatttggaacttcttagagactggttaaatggttctcaccaaaatgctgatagaaatatggacagtgaagaccagactaatgaagttggagatgcaaataattgagaactagagtaaaggtcacccttgttatgccctagcaaagaactaggttccattacatccatgccccagggatttgtgaaagtgagaacttaagagtaaaaacctagggtactggtggaagaaatttcaaagcaacaaagcagcattcaagactttgcctggctgtttctaacagcctacaatcagatatgggagcaaaggaatgactcaaagttggaacttttatgtaaaagggaagcagagagcaaaagttcagaaaatttgcagcctggccctgtggtagagagagaattcaagcagactgtggagtgaccactttcaagagagactagcatcactgtaaggtagccaagtgttaatatccaagataatagggaaaaggcctagaaggcatttcagagatcttacaggcagcccctctcaacacaagcccagaggcctaggaggaaagaatggttttgagggccaggcccagagccctgctgccctgtgcaggcttgcgaactgttccccacatcctgactactcttgctgcagctgcagctcgaagggcctcagatacatcacaggtaggtgcttcagggggcgtacaccaaacccttggtagctaccatgtagtgttaagttggcagatgcacagaatgcaagcatgaaggaggcttggcagcttccccctagatttcagagaatgtatgagaaagcctgggtgcccaggcagaaggctgccacaggggtgaagcccttacagagaaactctactagggcagtgcagaaggcaagtgtggtgttggagccaccatacagagtctccatcagggcgctgtctgttggagctgtgggaagggggccacttctctctaggtcccagaaaccatggacagcttgtatcctgaaaaaagccatagggattcaactccaatatatgagagcagccacagggtctgcactctgcaaaaccacagggttgaagctacccaaagccttaggagtcagtgcttgcagcagtgtgccctggagtgggacatggagttaatggagactattttggagctttaaggtttaatgtctgtcctaccaggtctcagacttgtgtgggccctataggccctttctgttagccaatttctcccttttgcaatgagaatgtttacccaatacctatatccacattgtatcttggaagtaaataacttgttttgattttataggcttataggtgaaaggagatgagtctccagatgagattttagacttggtacttgagacttggggcttttgagttaatgctgtaatcagttaaaacttcggggaactattgggaggacatgatttcattttgaaatgtgagaaagagatgagatttgggaggccagtggtggaataatatagtttgtatgtttgtcctctctaaatctcatgctaaaaacagattcccaatgttgcagatggggcctagtgggaggtgattgcataatggggtcagatcccttatgaatggtgtagcaccatgcccttagtgataagtgtgttcttgctcagtttgttcatgatgggagatctggttgtttaaatgtctaggactccacccgccccccgcccccccgccacctctctctcttgctcctgctctctgcacgtgatgcacttgctctttcttcaccttccatcatagttgtaagcttcctgagtctctcataagcagatgccagcatcatgctttctgtacgccctgcaggactgtgagccagttaaatccctattctgtataaattagcttacctcaagtatttttgtagcaatgcaaaaggagcctaatacaaattagaaaaaagaggtagcacatagaaggatatgataactcttatttgagagaaaagcaaggaaaagactttctggaaaaagtgatatggggctagaattttaaaagacgagttgtagttagtctatagaaaaaaggagaggccaggtgtggtggctcacacctgtaatcccagcactttgggaggctgaagagggcagatcacaaggtcaggagatcgagaccatcctggctaacacagtgaaaccccgtctctattaaaaatacaaaaaattagccaggcatggtggcaggcacctgtagtcccagccactcgggaggctgaggcaggagaatggcgtgaacctgggaggcggagcttgcagtgagccgagattgccccactgcactccagcctgggcaacagagcaaaaaaaaaaaaaaaaaaaaaaaaaaaagaaagaaaaaaggagaataagaaagaggattgggagggatattgccagagaattagcagataccaaagccatggaaccgtgaaatataatggaatataagaaactatagtcaagcatttgatgataactagaatataaaatgggactagaaatttcagaaaggtgagtccttttgagaatcagcagattaaggataagcataggccattttacatggtaaatctctaaagaatttttaaaaggactgtcttaaaatttttgaaaggtttgtgatgtctcttccctcaacagccaagtctctactcacaccaaaaacttgacgattcaaccttcacaaatcattttgtaaatcacctgtgtttccatttgtcctctcagcaatctagttcagggtctgcatttattcttacgtaaactgttgagatgacctccttgttcaatgccagatgcacatcatctccatgataacttcattcagatcatgcattacattttacccaatgatttttatgttttaatttttataagaattttcagaggtttgttatactctatgaggttattaactccactttacaaaatgaaatagaaactagaggacacagacaggcaagttcacccaaggtcattgaactaagtggcagagccaggacctccaacctatctcctctgactacagatgtttctgattatctatttaaactcagaatatttgtaatattcttcatggaatggggttggcagtttcataacctcaaaattgttatggtgcattgggttctaggattttgttttaattgcttttgaaaataagcagtgacaattgctggaggggagagaaggagtaaggagctcctaaaagcattgtacattgagaccacagaagtgtgactgcctttaaaaatatatggttcctagtttttatacttatttttgttttcctcttagtgttaggcaacattaaattaactctagttggaaaattacattcctgaagtatctcccaaatgagcctgagcaaagaataaccatttggctattcagagagaactgaaaatgtgatttctctaaacacaggctactcaggaggaaacacttccagttaaatgaacaggtgatgcttaaatcttaaataattaggaataattgtggtctactcaaccacttctgctctaaatgtattcagacataaagagagactctgttttttagcagtgcagatgggacatgtacttctccacgatattaatttttcaaggattcaatagcgataagaaatacttaaccaggctgcaccttttaattcttttggtgaataaacttgaggccaacataatactcaatcttttaaatagtatatgtatttaaaaccccacttttaggcaaattttgttaagaatgtcggctttatagaaaccatgactacatctcaatttgggaattcgtgagagtttaataaaaattaattgaattgtcatggaaaggctgaagctagacaaaatagaaaatgttacttccccatagaccatcataggtttgtttgctgtattgtgttcctagcaaacaactttttaaaaatcactgagaagagtccttggctatgagccctgcagttctcattagaatggatctctcccaatgacacacctggtacctgatatctgtagcaagtacaaaggccaaaccctgcaaaccttcactgagtgcagaatctggttcacgcatggtagtgagcaataatgaggtgggctgccgaaccataattgcaggtgactgagaggtgtctatgaagcctctatagcttccagcatgaagcttgtcattgctcatacttaggtcatcgtgatttatcaacttaaggatcatcagattcccaaagccaaagattttacatattctgcctttttgtgaaaggtaactgtcattcactttgtcttaataaccctttacattttgatggagctggttaatctgatatggcagcatgtgaatttttcagcatctgaagagtgtgttaattaaatacttctaacagcctggaaaatattactgtattcatcactctcttctcaactagagagagagctgaaagaggagggtcaatgtcttggttacattctctcccaacctggaatactgccctgataggaaataagagctgatggagaagaggcaaagatgcagggaagtaatgggattccataacttttagcctttcacttgaaaaacatgattgaacacttactgggctcagatgctgggaatatagagatatgccaaccacagttcctccagaactttgctttccatcaaacctgcatcatgtttttacatctggatgagaaaagaactgttccaaatgaagtatcagatatatagggccgtctcaacaactcaccattccatttctcttacttctatatttaatgctatatatatttagtaccaaaagagtatgcatttggccctagtttccctatcaacaaaatctaaagatgagcctaaacaattccatcctcagacagttgaaagaattttggggtcatactctgcattttaccaggttttggggaagacatctaaaaggaatttgacttttgtcctttaaaaatctctaaagcaagccagacatggtggctcatgcctgtaatcccagcactttggaaggccaaggccagaggcttgcttggggaagaccagcctgggcaacatggcaagacctcatctctacaaaaaaattttaaaagttagccaggcctagtagcacacatctgtagtcctagctactcaggagactgaggcaggaggatttcttgagtccaggagtttgaggctgcagttagccatgattgcatcaatgcactccagcctgagtgacagagtgagacccagtctcaaaataaataaataaaacaaaaaaactctaaaacaaattcctattatattacttatcatgttattttcattaatctgcacatagctccatcttctctactcagctacctattcctttaggtaaggggtgtgttcatctttttacccttgtttctaatacaatgatgggcatataacagtgcttaataaagttgttgatgtataagtacaataaatgtagaaaaaacagtggtcttgatgtataagaaaagattgtccatactttgagaggttatggtttaaattatagaagagaaaattcaaatgaagagaaattaagtggcatctaagaagtgaatttaaaatactttgtaaacatcctgggaacaattgcaaaagagcattgtgctgcatgagagaaaataggaactgtggacttcccttcatagttcttcatcatccagtatgccaacctgggctttttcacacagtaattttatggtcctaagagcagcaaaaggatcatcctcaatgtgcaaacacttttgaagtctctgcaatcatcatatttgctactgtcccatgagccaaaaaagtcatatagccaagctcagagtgagtttacgagcatactcgcaaaaggcctggatacaggaagacaaacacattgggaccctagctgcaatccatttatcatagaagggtaaggattcccaataatagcttctactaattccatatcctgtggttccagttgtacaaaaaataaaaccccgatataactgcatgcatacatgcacacacacacagacacatacacacagatctggaaaatatataaaaatgcattaataatgtttaatatatgcttctgtatttttaaaagattttaaatatgtttgttttcttgtattgcatatgtatcttgttattcagcaaaaacatctggaagataataaaatgtgattttggatgaggtttcaccttttgtgctttttatatttcttctgtgttttccatgttttctacaaagcatatgcactcttttataatcagtcaaatacgtgtgtgtgtgtgtgtgtgtgtgtcaactacactttaaaaatgatatggagttaggccactggagtacttctccatctggtttttctttactatgacaccaggaagaaacagctgaaaagttaagttgataacaaattctaaaaaaaatgtttttactccatctacaaactttgttttgaagtgtgcagctgtcactggttgcctgcttggtttcctttcagacgccctgctggcattgaagaggagtctgttttatttgtctggtcagaaggagcccttgaatttatggatgaaggagacaccctgaggcctttcacactctacgaatatcgggtcagagcctgtaactccaagggttcagtggagagtctgtggtcattaacacaaactctggaagctccacctcaagattttccagctccttgggctcaagccacgagtgctcattcagttctgttgaattggacaaagccagaatctcccaatggcattatctcccattaccgtgtggtctaccaggagagacccgacgatcctacatttaacagccctaccgtgcatgctttcacagtgaaggtaagaccctttagaaaagtaacagacatgcagattatctggtgaatacgttgaaattaattttcttgtccaacttctcatttttcttcacttagggcttaaatatatgaaaatctttcacttgtgaaaagttgcaatgtagtcacggggataagatactgaactgagtatgaggagtattggagaccagtttgtagaccacgactaattttgattacctcaaaaccaataaataaattttatttattcataaaattgcctgatttccattttccatatttactaagtgggaatattttttttttgagacaggctctcattctgtcacccaaactggagtggagtggcgtggtctcagctcaccacagcttctgcctcctaggtttaagcaattctcctgcctcagcctcctgagtagctgggattacaggtgcccaccactgcccaactaatttttgtatttttaatagagaggggttttcaccatgttggccaggctagtctcgaactcctgacctcaagtgatctgcctgcctcagcctcccaaagttctgggattacaggcgtaagccactgcgcctggcctaaatggaaataatttagtcttgatttccattttccatgtctactaaatgggaataatgtaatgctttcctccatacctcatagagatgaggttcagatgaaattagacagaatatttaattttctacttccccaacaagctagtataatatatagctatatatatatgtatatgtatatatgtatgtgtatacatgtttgtgtatatatgtatttgtatatatgtgtgtatgtatgtgtgtgtatatatgtatttatgtatatatttaaatatacacacacacacatacacaaagttgcatacactatggcttactggtgatttttttcagggatggcttcctctggcccatagaacgacttaattcagttcacctgagcacttagtagctcctgagtgctttctttatgtccagcataacctcatggtctatggaatatacagaaacaggatggtccttgtcacagggagtgttccgttttataatattgcagagatgagaattgcacataaggggaaaagaatgagaagcagttgagtacagcctataatgtccactacactgagacttagatcccgaactccactatctactagctttaaaccacagtacaagagagagtaacatcatataccaagtgttaggcaagaaatgctctgggagatcaactctcaaactgaagatgcttcatggataagattaaattttgtggtcttgggagtgaaatacaaatatgtgccaagaccttattaaatatggaaaaccctcaataagaacaaataaacagacaaactaaagcatttataaaaaaaccaaaaaactatgtttctatgctttaaatcctggaaggccaatttacatgaaggttatcttatggaggataacatttatcaaaatatttaaattacagtgagcaaatatattttcattaaactccagaagagcccttttaaattaatagtttaaagtacaatgttttcccactgtcctcatgtttaattttctcatatgactaaaaaataagcaatatgtaaatgaaaggataattgttttatcttcatttttatctgtttcagaattagtactatatttttattagatagtaaattatgtactagagtcttttatattatgtcttctagttcctatatgataagcattagaagcagtgttcttaagtgtaaaagatactttttagtggatatgtgatccaggaggaagttcgttacttcccaccatatccttcaaactcatgttctaaactttcacccttaaagtaaaacgtttatgagtatactgaaacacccttgttaatagctttctgaatgaggcaccttaatttaaatatgtttttattgaaggcatcaggattataatgattaaacctctgatcttttaaaatacaactttcaggggtaggagcctaataatcatttagtctcacgaaacagttctattggaattcccttgtggaataaccctgtaagtcatcccttcataaccagcttcattttaaaacacaagatttaaagtatatgatgaatccatgaactctgttctttatttaatcttctaggctctatttttatcacactaaaaagcttctgaaaagaggcaagtgtatggccccaagctttaagcggcacagggctctttgcacatgggccctccctgatgtggctttcattttgacagtccagtactggtgtgcttttctatttttccaaagattttttttcttgcaatgtcgaatagattagccagaataattttaaaaacaatacttctgtgtcctatttttgaatgtgtatgtgtgtattcaaagtggcctcccaaaacctaaatctttggctcttagaatttcaagagaaggcttcattagatacaccaagaaaggtcccacctgatcttttcaagcaaacaaggacatcttccacaaagcaatctaggcaagtgttcagaccttctggccactggaccacgttttcagggcatcagggcaactatgactctttatgatctgacacctttgaaggaagtcatcaggaaaatgaactagtgtttttgtgtttcacttattcccacagtccctgtgtaggagattgtgttcaatatttttgtttaaaagatatctaggccagacgcagtggctcatgcctgtgatcccagcactttgggaagctgaggcgggcagatcacaaggtcaggagttccagaccagcctggccaacatggtgaaaccttgtctgtactaaaaacactatttttagtatttttactatttgagaggctgaggcaggagaattgcttgaacccaggaggccacggttgcagtgagccaagatcatgccaccacactccaacctgggcaacagagcaagactccgtctcaaaaaaaagtaaaggaagttctattacttatccagggttctatactcctcaccgtcacagaagaatgtttcttttatctcagacaaatcctgcctcctataatttaagtctatctccctttgttcagagcagcatgacttctccataatagcacaaaggggcttcagggtccaacaaattattgacaattcaatctgatttggcaaataaccattgagtactatattcaatatgtcaatattgaataccaaacttaactatgttgttgaagtctactgtgagacttggcccttgagcagagcagagactgtgaggaagaatgagtgattcgttctgaggcacaggctattactgttgggcattttgggtttttaagcttcttgcagctgcgtttctgctgcccatgtttagaagaccccatttcatttttatttttgtataaacttaatgggtccaagtgaagttttgttacctggatatattgtgaagcagtgaaatctgggcttttagtgtaaccgtcgcacaaataatgtacatcgtacccatcaggtcatttctcatccctcaccctgctccctccctccctcccacccttccgagtctccagtgtctattattccacaccctatgtccacatgtatatattatgtagtcctacttataagtgagaacgtgcggtatttgactgtctgtgtctgagttacttcatgaggataatggcctctagttccatccatgttgctgcaaaagacatgatttcattcttttttatggctgagtagtattctacagtgtgtgtgtttgtgtgtgtgtgtgtgtgtgtgtgtgtgtttcacattctatatatatccatatatataattacattctatggtgtgtaaaattattcctatttagtaaatatggaaagtggaaatggaaatcaggagatatatagatatagatatagatgatatagatatagatatagatatagatatcacattctgtttatgcaatcatccattgatgaacacttaggttgattcaatatctttgctattgtgaatagtgccgtaatacacatacgaatgcaggtatcttttttaatataatgatttattttcctttgggtagatgcccagtagtgagactgctggattgaacggtaattctacttttagttctttgagaaatctctatattgttgtatattgagaaatctctataggggttgtagaagactccattttaaatcgcatcccaagtacttccctagatctacttactgtttatctaatttctgcaccaggtaaacaactttactgtcttctttcctttctgtgcctgctgtaggaaatttttcaagtttttgtttattggccactctggctaaaattcttcagggcaaaggaactacagaaccttctccattaatgaggcacagagtccatccccacaactgtaggattgcagttcagtccacaaactcgcaagaggtactgctaatgcattagtcccttgtttattaagatctcatctctgcccaaggggccatcaataaattgcccatgttgtggtgccatcactagcttgccccaaggtccccccagagttgtttatagacaggtggatgttgctgagagagccacataaaacaggtgcaatggaggcatgaattctgcttgtggtggcagtggatggagaactggcagtgggggccctccgtgggggtgagaagcgtatgtgttggcaggaacagcagcagcggcagcagcagcagaggcagcaggagcagagaaatggaaagagtgtgggttttaatgcatcactagctgctctcccaacctcatgaaaagtttcacctccctactcatctctatgtaggtctttctaaggaagaaagagggagatcaagattcttggggtctctttagaccaataccttccattattgaaaacagctttaattagaaggccttaaactcccttcccaattagctctgtgatgaattgtgcggtgtcaggaaagaaactgtatttagccttgcttggcatgcaggagttccatggtggtatttacagggaacactcctggcaaggttggcgatattgctaccaccatttgggtttgtttgctttttctcactggcatctgccattgtgctggcagaaataaatctgataatttgggattttaaagaaaaaggtggtttacctattatctgtgccctaactatatccttgcttgttccacggggttataaaacgtcaagcccagatcatgcatttgcccagtatcctaaaagataaatggtacttcactctgtgtagaatcaagcataaggtgctgagaaataagcaaattatatgggtcactaaaaattggcttccaatctgggaataaaatccagaattactaactctagtttctagattctagttgccaggcttcctttcccaatgtcaaggaggaggtagtcaaaatttcctcaagggtttgtttcctatatctttaccattaagtagatatgtggcaaaaataataacaataataataaaatagatatttcacaattgccatgttatgaagagtgtgtgagtaaattgataaatttatttttaatcccattttcattttggcttagataacataaaatattactgctctttacatatgatcttaaattagtttcaactctttttaatttgatgattcttagccttttctccccagacacatttattagacaacagaaatactctgggagatgtagctttctaaaaggactcctttggtgactatctttctaatgtgaagaaaaattcagtaataaaaataattatcatatttcctgggtcggttctataaactgagattttcacattttataataagaaataactgtgtcattcttctatataaaagatagaaaacatgggtgagtaaatatcacacaaaacaatgaatatttgtcggcctaaccctttttttttttttttttaaagagacagggtcttgctctgtcacacaggctgcagtgcagtggcaccatcatagctcactgcagccttgatgtcctgcactgaagtgatcctccctcctcagcctcccaagtagctgggactataggtgcatgccaccatgcccagctaattttttaaattttttgtagagattgtgtctcactaaattgccccagctggtctcaaattcccggcctcaagagatcctcccgctgcggcgtcccaaagtgttggaattacaggcttgagccactgaccatggcaaaactttttagttgtgatgatattttagctttaatatcaacttttcatttacttgccttacataatctttaacccttttgtctaatttgggctagacaaattagactttcagacaaatatgtatttgtctgaaagtcataaatacatataaagaatctaccttttgctcaacattattggggatgaaaaccatgtaagtcttttgaaatttatgtaattacatctttgaaagagccatatttttctccaaccactttatcccagcaagctccatcaggattcccttgctcacccatcagtaacatctaaggcaggtcccatgattttccagtcacttttcagtggcaaggatcaacgcaactggtgattaagactcattccaagtgttttttaaaaacttcagtctagactgggggcgatggctcatgcctgtaatctcagcactttgggaggccgaggtgggtggattacctgaggtcaggcgttcgagaccagcctggccaacgtggtgaaatcctgtctctagtaaaaatacaaaaattagccaagcatggtggctggtgcctgtaattccagccactctggaggctgaggcaggggaatttcttggacccgggaggtggaggctgcagagagccgagattgcaccattgcattccagcctgggtgacagggcaagaacctgtctcaaaaaacaacaacaacaacaacaaaaactccagtctaaattaaaacctgatatgtgcttaaggatctgcagtggggaaagagggcatggtcattttcctctttcttcagttccctcttctcttatttatttccccaggatcatggcatgaaaagaaagaattagacaaaaaggaacagagctttactcaataatattgctctaattaatcttctattaattttgagggggcagatgcctcatgggattttctctgtgggttatataggggtccccataggaaattccatgcctcatagtcctctgatgcaggcaatacactctctggctaatttcttactatttgttattgtccaagaggtccaccctacaacctttttttgcctctgggggcccttctcccaagcaggcagccaatatcaagtcctatcacgttgacaaaactcattcctttcttggcacccactaggattgcagaaaactttggtttcaccaaataatgaaggtacagcttgtccagtactatattctctgcttgacctatcatgctggatgaaacctagccagtctcctaactttggaattcattgactaagacacaggtattagcttctgtgctagcctattatcccaaaactatgggatcacttaaggatttcagaagacccttttgactctagtcattgcatcaaaattgtcctatgaatttcatcagtgcagtaggaagcctcttgccaagaccagactgttcatctcacttttctggcaacactcccaatttcttcaagagcttctcttggatattccttgcatgccttgaaaggggagtgtggagaaatcccattccctccctgaagtgggaaagatataaccaaagcctctttcttctccactgaatccccttctttaattttttttatgaacttggatcttctcatataggttgtctacatagatcttcataggaagatggatcttgaagtctgttttttccataagtcatgcagtgatatgtctagctgttccagtagagttacttaccacctatttttctaaatcatactcattattctccaatacagttctgtttcacatcctattatataactaaatggccctatcatctttctagttgcacaagccagatcatttttgagtcctctctcttccttacttccatatcaattcttcactaagtgctattgattctatttccaaaccatatcttaaatccttccacttgaagacaacattaggatcttcacacatgttaatccctcctcctggaatgatggctcattctcctataattcatctgtcctcattcttactcatcaagtctgaactaaaatgttgcttatctcatagggctgctgcaatgactaataaattaatgtatatgcaaagtactgtaaagggcaatataaatagactataaacctttagcagtccttctttttgaaaaaacagagactggaataaattagcaaatgtagataaggttctggtttgtctaggcaactgtactaatttggtcatgagtgaaaaaccttatgttttatacattttaagtgttcctcaccttgcaataaaattctgagcttgcaaatttacatgtttcctgataccacattgttaatttccctgtaattttccaaatactggattaggttctatttcctttctaaactgcctgaagcaagaacatgctttttttttttttttttttttgtctcctgaggtttattacggtcttatccctggcccccctgccccaacaacatcacatacctgccagtctaagagccctcctcaggagatttccaccctatatgtagttctctttacctgacatgacactcttaggaccctaccctttcccttagatctgggattatatcagcagaacatgatgaggtattttagtcacacacacacacagacacacactctcacacttctcaaatcatacaaatggattctgccaaattggcatctacctacttcccctatgccaaatagtagtttatcagtacatgagggacagttagttggtggggagactgtttgacctgtgagtcaagtatgttgctattttctggcctttaaccaacttacaaggaaaccctctttagacacctaagactcccgtggagccttgtcaaaaatgtctgtgaaagtaaaatgaactagtccacatactaacaggcccaggccataaattcagaatatatgccatttagcagagacagcaagctgtaaatggcagtgaagggcagaagttaattgaactactctgctcttgtcacagatggaaagtagccactacctgagacaagatggctgccccgaagtaccctattacagccaagagatcatatccttagctctgcaagggcttatgggtgagggggaaatcatacacagatgaccaatttttttatggttcacagccgataaaagtgaaattcagcagctgttcaggacaagtgaccactgtaacagctgtaatataacctactaaatagagagggaattgcattagagcaagaggttagctgtgatcatcggcaggtgagtgctttattgaagttgaaagaccattaacattgatagagtaattatttcaacttgaaagtaattaccttgatgggtgataacttctctagtgttcccagatttgattgggccaaacaattgtgagctcctgaagcctagaaaaatattacaacaatactgtgatttttaaattactgaaaccactgttggaatattctaattatgccgaacagtgaaaagattttgccttacacaagctagtgacctctcatgtagagagagacatttgctttttaatccaaatgcaatgacccacacccaccacctgtgaatacatatgtgatgggtttgcaaatgaatctttttatctcaatataatttttaaggtgaaacatcttgttagtgctgtgcctgggtaatagtaagctagaactgctgacatttttgatcatatctatggacttgaagtctccagaatggcaactatcttctatctttgtcacagagggtttaaatttgtataaattaaatattttgataatgactacacataaattagaatttctggatgccacgtactttggatcccaaatttcagatattatctagttacataatcagttgtttaaataactttctcgcctgatgttatgcaactccactacaaacactccattgtcagggtattttccgtttacctacactggacatcagcaaacaaaattaaagttgaaaacctgggctattgcttctctgtagtctcatgaatatatgaaaattgcaagttatttgcaattgagggccaagacacatcaaatctaattcagtgatcaagaccaagaaatacagggctcttccattaatcagtttttcaccatatttctcttttgagaatctacttggtccagaagctataacagatacaaacaaacgagaaatagtcttttctctctgaaactcgtcgtgtatttggagaaacaataagaaaagagacaaaatacaatgtaataagcaatcattttgtcatgcatggtattgattgtacttataaatagttacaagaacctaggaagactctagcccatactcctgaatccaaacccagcactcattctatggaaccacaaaccattgacagaaaaaacacaggcatcatgattcttagtcatgttgtcagaaaagatgaatgtgacatcaccttaaagttcctggatgattccgtagacctttctatcatcttggcagggtttgatcagatgatcagccaatgaatgactatctttttggcggcacttcccaggagttttttctaatcaaaatctcagactctcctagggacaaaacaggtttctacttgttgtctaagagccaataaggaatgttttaccaagcagttaatgggtttctttcatctctccatctcggctctgaattcccctccatagacaaagtctttgggtctctgtttcagaaattaccgtagggtagaaatctctgccaagccagaagacatttgcccactggaaagtaatgtaactggcttgaatttggtaaaagagtgaaggtttgagacaaaaacataccacttgggaaagtgataaaaatttatgaattgaattgtaaatcttgccattaagccaaccaaagagtaacaaaatctgaccaatctgacagcacatcagagttcttagcacagcaggctcaccatgtgtcatatacagccaggctaaagattgtattaaggacccccttaggtactctgaatttaaaataagtgtaataactcatttttaaacattttatatgatacttgaattattaaatattcacattacaaaatcagagaattttaatccattcaaaagggtgggttgtctaacactgaaagataatggtcatgtctagatagtaaaattacagtatatttttaacggatgtacatgttactttttgacaagacacaagtagtgaattttatcgtacaaattcctattgggtgattatgatacagagttttatttttgctaaagcaattactaatgtcatggctggatacctgtgcccattagtggctggttctgtgtttttttaggatggttattgatctcttgctgagctgagattcaggttttatgccagatagcttgattaatgggttggtttctataagtggactgaatggggatagaaagcaggggcagcctgctctgccaaccccaaatccgtcaagacgcatagctcattatgaaacagttatcaaggatacatgaaaaattaattgggctcagtttgattctgaaaagaatcggctttctacttggcgggcccccccgccccccttccactctttccagatgttctgcaccagcccctagagaaacagcaaagggagacgtattaatacattgtattgattagatcaagacccctgacagttatttgtagagataccatctggctgctgttcgaattccttcaccaaaaacaggacgtgacatgttattaatctcaactctctaagtatagacagttgccttttctgctaaaccgcattttaccattccgtaggagatggaggaagacctgaagggtgcagaaattaaggttattacacaaattgagccatatggtccaaatatttcagcaagaaaattgccaggcaataaaaattgctcctgccttcctaatggtgtaaattacagtttaaccatggctctaatgatgtccttctgccgcgcttaactactgttacatgaaggacattgttttaaaaatataaaaaacaagtaaatgccagcagcgtgttttacaatctgttagtgtgtcattaagaacactgtcagaattacataaacataatggcaggcaacccagcatacaaaggaactcgtatggaaatagaaagtgtcttgaaaactctcttcattatctctgaaatgtcaagagcactgtcccctctggaagttttctagggagaaaagacctgtccatctagtgctttattctaattctcatgtgtgtcccaacagcagtgttttctaaatcaagtgtcacaacccatagtgagactaagtacacatctggtaccacaaccctgtccatatacaaaaaatgaagcagacaaggtgaggagacagctaatgaattctaaacaaaatgatagacgttgaccttttgaagtatttttgtttttggggaaaacagttaagactccactatcttccttgatgatgacatcaacaattaaaagtataatttctatcctcagcaaactaacctggcaacagaaaaccaaataccacatgttctcacttgtaagtgggagctgaacaatgagaacacatggacacagggaggggaacaacccacactggggcctattaggggggtgaggggaggaagagcatcaggataagtagctaatgcatgtggggcttaatacctaggtgatgggttaataggtgcagcaaaccaccatggcacacgtttacctatgtaacaaacctgcacatcctgcacgtgtatcccggaactttaaattaaattttaaaagtataatttctgtcatccctatttggggcatgatattaagaggaagcttacttaagataatcaaaaatctttgggaattacaataaagaccattaatatttgagtaagacttgaacccttcaaatatttttagacctattacaccaaaaacacctcggcacttaaaaattccatataggtcatattgatgttttattctctaaaactgcacaatcctccaagctttttggtcttctaagatgttataaacacagtttgttaaaggaaaagtccagataaacgtttgtagaaaaatttgaagggaaaactacttttaattcccagaggagagttgccttatctttaagccctttttccttctccatttccccaaagggagaaagaccaggatataaattgccctttaaactaaaaaagaaaaaagagagggaaaaaacctaggaaaccaaaaaattattctttttgcatgcatgcattaatattaatgagaacccattaagttattatttcctcatggcacaaatggcaaggctagcaatctattgactagagcatcttctgcctggaaagctcttacccaggtgtccccatggttggctcccacactttcttctggtcttaagtgaaaagttactaccactaaagccttacctggcctactcagctacaatttcactccactctccctcacacacactttctattcctcttctgtctttatttttctctttaatatttagcttttatttctggtttcttgctaacctgtaatcatatttcagaaattgtttttcaaatgctttgttatgcttcttatttcacctaaaaggaaatctgtatgttcacagctaaatcaaactgagaaagcatcatttatatgttccaatttcaatttataagctgacaacttccacataaaacatattatgggcactttacacatgccatcttatttcacctcaataaccaatctgtggagtattattacctaaatttattaatgaggaaatggaaactcagagaggttaagtagcatacccaaggtcacacagctagctgcagagtttggatttgattgcagctctctcagcttctaaagccttttctttctgttatccagtattgcttcttgagtttcagcctagtggaacaagatgttatttatgaaaagctaaacatcaatgaaagccacaaattatagttcaataggacaaagagatgacacagagcttgatatgattcattgcctagtataaatatagaaaacaattgataaaagtttcaaagaattaaaagatcacttggactggaaaagttcagagaaggcttttgggagaggtctgtgctttgaacaatgggtgaaattcaaatagaagaaaagtagaacagatattaccttattcaggcaaagaaacagaagcctggttttgaaacatctgatggcaagtctctgcttcaggaggtcacatggggaatatttttccaatatgcccccattaattgggctgatattaaaacaactgatttaaaaaaaaaatcaaaatactcccaagagatgcctagcaaagctattgagtgaggtggttagcagcatgggtctggggtcaggaaacatagattagagactggctttggcttttttactcattgtatgccttcaggaggttatgcctaatagtgcctcccgcagagaggcagcacctcttagagtcgcaggaactgagacggcactcagtaaatagtggtgagtaagattcaaaataggttttcagagaagaaatcagcacatgaagatatcatggtgtcatagtgtgttgacagggtcctgtctggagatactagtccagaatttcaaaaaaaggaaaagttttcttctggccgggcgctgtggctcatgcctgtaatcccagcactttgggaagccgaggtgggcagatcacctgaggtcgggagtttgagatcagcctggccaacatggcaaaaccccatctctactaaaaatacacaaattagccgggcatggtggtgggcacctgtaatcccagcaacttgggaggctgaggcagggagaattgcttgaacccaggaggtggaggttgcagtgagccgagatctgccactgcactccagcctgggtgacagagcaagactccaaaaaaaaataaaagaaagaacaaaagaaaagaaagacaggaaggaaggaaggaaaatttattatattttcttgtttcccctgcattccctaatacccctttcccaaaagtatggatttcttcactaaatatgttagtagcagaatggtcttgtggcagttgacccaagactccaggtagagcagtggggaaagaaaagacaaggccagccaagaggccagccaagaggacaagctcctccaaaggttgacttgagatattaaactcattgaaaaagttactcaacatccacagtgttctggtggtacctcacttagtcctggacaatgaatcacagcccaagcttcatcattgaattggtgacactgccgagggccaactcaccagccttcaaaaacgacagtgctgctgacagcaaaggcgatgaggacacacatgtgcatccacccttgagatgctaaaagaggcaggaaagaacttgagggaaagaacaaatcactcttctgagattgtcctataaactttataccaggacctatgctatcatcctccttacctaatcatgtttaatatctgatttataagaatctaaatgtgtacctaaaagtagctttctaaatattactgggccacattaaactgtgaccaattttcttccttcctggcctaccacattttagaaatatgatagcatatttgggttgggagtcgctaaaggcctcaagagagtccatctctttgtcctttctgactaggaagacctggtcatcacgccacaagccttggtgtctcgtttttaacagagcaataattatttattagtggaatatatgcttattatatccagaaattaaagttgttaggggacatttgtgtatccaggtccctgtggctgggtgatcgcatctgttagaaataaatcactttaagaaaattatattagccccacagacagtcaagaatggagcaaagggagggaagtgtgaatagggtgaggaagcttgattttaaatcttgtgaaatagagtgtggtcaatatgttgtcagcacattacagtgtgcagacatcaactccatttttcccctctttgaacctcaggtggccaattaacagtatatgctatttattcattacaaaacaggcaggacaaattgaatggttagaatgactaataagaattcttagcaaggagtaaaataaaaaatgatacataaggagagaccccccagaaaaactttagggatttccagaaaaaaaagtcttgaggagttttcctgttaaatgtatctagaatttctactgacatgaggaaattaaaatggaaagattctctttgaatacattttcttcctaaaatatgttctcttcaattccctcatttgtatttccttagagtttcattccttcctaaagcagaaagacagttttaaattacttctagcaattataagtatcattagggtgttttgatgctgcatttttacaacaagcactgtgcttgccttccttatttgtctctcagttcaactccaagtcgcaacacaggaaatgaaaaccttgtaaattgacttgatcttatgaatactcacttttgcaaatatgaaagaacttaagaagggattataaaatactccttatctatataattaaaattcagttgaaatatatgaattcaatattttaattcatgcatttcattttgcgggcattcaaagattatatgcttctatatgtctgccattgatttctgtaaataacattatctctcttattgcaaaacgtacatcagaagaagttggaagaaagcgagggcttgagggatgttaaactgaagcagcagtgacttactatgcagtgttagtagattgcttgccttgaggatctagaagccgatagaagaaatggagccagcaaataagaaatttcttatttcttattccagaaataagaaattctgaacttttaccttcaaagatccaaaaagaacatgctaatgttcttttttttctaacttttgagtaatttagtcattctcgttcagaaaattaagggtctacatctggcagcaactgaaataaatggctcaattgagtacacacttgaatgtcaaatatatcactttaaaagtcaatatttgtttcagctgtaaatgtttctgaacggaaatgatgcttttagtgtctgtagtctaaggagtagttttatttttgaaccctcaaattgagtgctccacctagagccgtaggaccctttcctttccatgaggagagcgccctctactgggtatgtttacttaccacgcatgactgttaagaccctgagctaaacgtatgagcagttgagatgtacataagaaagagtttttggaaaatctttgcccctgcttgtactagaatgattgcaagtgtggaagtagccatagttcactgtagttttctttttactgctgtattattgcaccctgttgggggatacatctgagcatttcatgtgtcctacttttaaaatgcccagatggtggctacgtgctttggtttgaattgggcagccctcatctttcatgctctgtagtctgcctcgttatcagagagacatgagacaaggaaaattcttccatttttcagctcctcttcatctgtttctagtcacccacagtgaatgatgcacttgcacaattgttaaaatgacagtcactgtgataactgaacatcacttccctgggatggggagttccctatgtacccatagcttcttgattccttcccaatacagcacctttttcagtgtaactgatcacttgcaatcttgtaagtaacacagcagtgagaggcagtgtaaatattttataccttgccccaatcacttgtatgtgcatcggtcttcttcactctagcctttaagcttaacagagattttaaatcaaatcattcaaccctagaaatagtcaaaagaattaataaaataaatgaaacagtgtaactggttaaaatagccccagtgcacaatacaggtttagtatgattttgtgacatacacattttatagggcttttgtctccaactacattcttcaaagagccatctgggcaatgaccataggtatcatttttaccaataatagtcagcacttcccactgggaaattagtcaagggaatgagtttttttttttttttttttttttttacaaattatcttcaagcatctatcttccaaaaagtattactggactttgtccattacaaggcaacaacctaagtgagttacttgtgctcttattttagaactttattcatcagatcattgtgatcaaactcaatttcattttcaaagaggaaaaagattttgctctgtttttcttcttaataataggtttgctgaaggaagaacattaatacaggtcagcgatctccaaactttttagaatattcacttgtagaaataataatttggggagcacacatctgcataatatgtatatttacttatttgtaaattataaaatatgtactagttaaatagtatcatttacactatagaaatagacatttttaaaggagtggaaatagataaaattatcaagaaaatattttattatgagcaactactatcaataatacctcaaggcacaatacacactgaaagattaatcattaatgatgctgaatgtcaatctctttcctgagtgttcttgatcatttcaaaattttgttgacacttctgatcaaatacaattggaccattcatgtttatacctcatgctgtggttgataaggagcttgaaggaaggagaatcagactggccatttatttgttcttcatttatgtttgtattgttagtgttatatttgaatcataaatttgaattctaggaattttgaaagccattcatgtttccaaagttagtatacttaaaaccagataatataatccataaacccccttagcatagaaccataaactacaatatgtcacttgacacaaggggtccagaaccccggggacgcagaccagtactggtctgtggcctgttgggaaccaagccacacagcaggaggtaagtggagggtgagcctcaccacctgagctccacctcttgctgtgctccacctgaggagtggagcacagatctgctccacagatcagctgtggcaattgcttctcacatagcaaaccctattatgaactgcgcacgcaagggatctaagttgtgtgctccttatgagaatctaactaatacctgatgatctgaggtggaacagtttcatcctaaaaccatccccacctcccccttccatggaaaaattgtcttccatgaaacggatccctggtgcccaaaaggttggggatcactgctttgcactaaaagcaaacaaatagatgaatattgttagctcctcgctgtaaaactcccattcttccttttccaaggacagatacagaacttaattgattcattcattcactcatccagtcagtatgtgtatgcatctaatatatgccaactgggtatatgacagtgaataaaccagacaaaaatgcttccctcttgaagctcttactctagtggggagataaagacaataaacaagataaggaaataaaatatatacataccatacataagctaagggcaatggaggaaaataaagcagattccagagtctccattataaaaaatacaacttttgcaaattggtctttagttcttattgagtttaaaaggatgtttcccttccacatccttcttcccactgtcttctgggatttttgcttcagatatgatggtcaaattgcttattataaattcccttctaagattctatgagttttaaatttgttttaattgttcacatgttgcattgaatgatgcaattgtactcttctagcacacagagctagtaaatttcctatatattgatatttaaagcctgtccttttatggagtattttgtgaccacctaaacccatgatgatttcttgtgtatacaccttcagtgcttggttcccatgtatttctctagtggtttcagaaaggtgagttttacattcctaatggattacagttcctaaaatccagtatgttcatactttctacttttattcctttccatttagtgcctagaaccatgccagaaaaagacataatttgactgtggatttaaccctcagatcacaaaccaatctcagagctttatttttttgctgagagttttaaataaactataaagtcaaatttaaacaattatcctttggaatcaacagaaccccacatttccttagctttccttagctgttcctattcccaaggatcacattcagagcactcttcttgagtgacagtgatgtgccaggtacttcacagaggtcatctgttttaattgtcacaaaagcccaagagaaagatactaactgttagaaatctagctcagaaaaagtagatgatttacctaaggtacatctagtgtgagtgacaatcagaacttaaactcaattcttctaagttgactgctgttttgattaaagcgcctgggctctcagaagtggactcttcctgggtgttagtcacaagggcttctcagaatttttctcctacatatgagacagcagatcatttctgcctctctgctaagataagccaagcaaaataatagattgtagaacaattaataatgcattcaaaatgccaaactcagcacactttctatcctttgtgaaaaattttgttcccattttgtccaaatgtctaataaaaatgattgtggaaaaataaaaacaatctttgatctgcctaaatgaaaataagaaccacaacttctagctctcagaacaaatcaaagttgtttttatttttaattaagtatgctaagcttaagtacattttctcttaaggtgtaattactaaaccatgatgatttctttttgtttattcatttaaaacacaaataaaagcagataatcaatagatcataatctaaaactagaggatttacaagttaataagcttgagtcaatagatattccataacaaagctttcaatgctgaacctgacataatttgctttgcactaagctggttgacttaatgctttaatttaattccaatattaactgaaaaatccaaagaaaaggggaaaatttaaatcctattatactgaaatatgttcaaagcaacaactcaatatcctgccacaactgcttaagtgtgccaccaaatgtctgcttaatcacctggtttctgattggtgataaccagttaacccgtttggagcctggtacaagtgaattgtggaagtttctcagtggtccattcatgcaatagcttttatcttagcctcaacagtcatcatattttcatctcataatgtctacttttcctgacttatggccaaattattggagttgtttttatttgaaaagcaatttctccttgtctcttgagattaccatccagcctgacctcccaaaaagcagaacagtaggcaggcctaggtcaaagaacagaagaaagcctttcttagttccctgaaaggaagatgtaagaagctatctgtatgaagaaatagcattagatggcatccatcatgcaaagtctggtagtactagtagaggtagtgagagggatgtgaggcaatatccagcataccttcaaggttatgagcacagactcaaaagacaggatccccccaggcaaatcctggttcttccccttacaattatatgaccatggacaatgtgcttcgactctcttttcatccatttccttatctgaaaaatgagggtcataatagtgtctatctcataaggttgttttaaggcttacacaatttaatatacataaagtacttgaaaagcactcattgttatcatcctttgagatactcttgaggcataaggaacttatgctaagaataattttgagaacagcagcatcagtcactgaatatagtagtcagatgtgtctttcagaagagttatgtgtgcacggccaaagtcctaaatattccatttgttaccatccttaaaatatcatttgtgaatttgtaactggtttttgctttgtgtcattgctggtcgactgcagtcagggtggcagtgttttggctgccccctaccatctttagttttctggtcccattagtgttgtgaccaagaacaagttagtgccctttgctcaagtaaatgggctagaagttaagcactgaccttttaccataggggacccttttctattctgaaagagaacttagaaaacagaacagaaatctcattgatttttacaatgcacattttttcatatttctccgtctctgaaattgcatgcatctaacaatcttataatcactgtagatggcagttgttacatacttgtcatttcctgtgcctgcacaaactctcgtcacttcacttgagttctgtgcaccgttggtacgacacacacattgagtttaattgccacttaaaatggcttcaaaaaatcatactatgatttggcattaaaataaaaagtatacacaaaaggcacagaaacagtcacttcatataaaacttaaaaagaaaaaacaaactatgcccatgcaagtctaaagaagtctttcaataagtataaaatacacatctaagtgataaaggaatcactgtgttcttgttgaattagcagcatatttttctctttcttagggatacataaaatagtttttaaaaaaataacagtgtgtttaaatagatgaaatcctggaccccaaaaataggtgtgttttataataaatatttttaaaacagctagcatattgccaataagataatgtatttaaataaaagataatttattcattccgcagacatctatagagcacccatatggtgccaaacatattttgtatccctagtccctgtcctctaagagttcaaggtctagtggggagaaaaggcaggtaaatagatcaatctaatataaaaatgccataaacagcagaaagaacagagaagagagacaagtaactcagtctggggagtcaagacactcttccaaatggagatgacattaaatttgtattttcaaggatggaaatacatcctttccaggcatagaagggcattctaagaaaagaggaaatcatgaacaaaagcgcagcctcattgaagagtgtgttgtaactgggtctgagtcatgagtctagggacagggtgtgaatgaaagaggcagaccagggagaggctaaggatgtgcccaaagagacaggctgcaggagattttgctggtaagggctggcaatcaaaaccaccctgcttcctaaccaggtctaggctctggcatcactctgacttttaaattaggaaagttagagcttgattcttgcacttgactctgtcaatgcattaggatctaggagagatggtaagtgatgttggaaagcagtccaaagttcataagcagttagctatttccatccaaggatgccatgatttcctctcctgaaactaagtgaacagccatgggtaaaaatgaactgaaggcagaacatgggcctctcatgtaaaagcagaagtaggggattcccaggcaagatggccaaatagaaacagctccagtctgcagctcccagtgagaccaacacagaaggtgggtgatttctgcatttccaactgagatacccggttcatcccactgggactggttggacagtgggtgcagcccatggaaggcgcagaagcagggtggggcgtcgcctcacccgggaagtgcaaggggtcggggaactccctcccctagccaaaggaagccttgagggactgtgccatgaacgactgtgctatctggcccagatactacacttttcctacagtcgtcacaacccacagaccaggagattccctcaggtgcctacaccaccagggccctgggtttcaagcacaaaaccaggcagctgtttgggcagacactgaggtagctgcaggagtttttttttccataccccagtggcacctggaaccccagcaagacagaactgtccactcccctgaaaagggggctgaagccagggagccgtgtggtcttgctcagtggatcccacccccatggagcccagcaagctaagacctactggcttgacattcttgctgccagtacagcagtctgaagtcaacctaggatgcttgaccttggttcggggagggatgtccaccattatggaggcttgagtaggtggttttcccctcacagtgtgaacaaagccaccaggaagtttggactgggcagatcccaccacagcaccgcaaagccgctgtagccagactgcctctctagatttctcctctctaggcagggcatctctgaaagaaaggcagcagccccagtcaggaacttagagaaaaactcccatctccctgggacagagcacctgagggaagggctggctgtgggtgcaacttcagcagacttaaacgttcctgcctgctggctctgaagagagcagcagatttcctagcacagcacttgagctccgctaagggacagactgcctcctcaagtgcgtccctgacccctgtgtcttctgaaagggagacccatcccagaaggagttcatagacatctcatacaggagagctccagctggcatccggcaggtgcccctctgggacaaagcttccagaggaaggagcaggcagcagtctttgatgttctgcagcctccactggtgatacccaggcaaacagggtctggagtggacctccagcaaactccagcagacctgcagaaaagcgccctgactgttaaaaggaaaactaacaaacagaaagcaatagcatcaacatcaacacaaaggaagacaatgaaacaaccccatccgaaggtcaccaatatcaaagataaaggtagataaatccatgaagatgagagtaaaccagcgcaaaaaggctgaaaattccaaaaactggaatgccttatctccaaaggatcacaactcctcgccagcaagggaacaaaactggacggagaatgacttcgacaaactgacagaaataggcttcagaagcaaggtaataacaaactcctccgagcaaaaggagcatgttctaacccaatgcaaggaagctaagaaccttgaaaaaaaaggttacaggaactgctaactagaataaccagtttagagaagaacataaatgatggagcagaaaaacacagcactagaactttgtgaagcatacacaagtatcaatagccaaatcaatcaagcagaagaaaggatatcagagattgaagatcaacttaatggaccagtgcaagaagattagagaaaaaagaatgaaaaggaacaaacaaaggctccaagaaatatggggctatgtgaaaagatcaaacctacatttaattggtgtacctgaaaatggcaaggagaatggaaccaagttggaaaacacacttcaggatattatcaaggagaacttccccaatctagcaagacaggccaacattcaaagtcaggaaatacagagaacactacaaagatactcctcaagaagagcaaccccaagacacgtaatcatcagattcaccaaagttgaaatgatgaaaaaaatgttaagggcagccagagacaaaggtcgggttacctacaaagggaagcccatcagactaacagtggatctgtctgcagaaaacctacaaaccagaagagagtgggggccaatattcaacattcttaacgcaaagaattttcaacccagaatttcatatccagccaaactaagcttcaaaagtgaaggagaaatgaaatattttacagataagcaaatgctgagagattttgtcacaccaccaggcctgcattacaagagcttctgaaggaagcactgagtatggaaaggaaaaacttctaccagccactgcagaaacataccaaaatgtaaagacgatcaacactatcaagaaactgtatcaactagtgggtaaaataaccagctagcatcataatgacagaatcaaattcacacataacaatattaaccttaaatgtaaatgggctaaatgccccaataaaagacacagactggcaaattggataaagagacaagacccatcagtgtgctgtattcaggagaccaacctcacgtgcaaagacacacataggctcaaaacgaagggatggaggaatatttaccaagcaaatggaaagcaaaaaaagcaggggttgcaatcctagtctttgataaaacagactttaaaccaacaaagatcaaaaaagacatagaagggaattacatagtggtaaagggatcaatggaacaagaagagctaactatcctaaatctatatgcacccaatacaggagcacccagattcataaagcaagttcttagagacctgcaaagagacttaaactcccacagaataatagtgagagactttaacaccccactgtcaatattagacagatcaacgagacagaaaattaacatggatattcaggacttgaactcagctctagcagatctaatagacatctaacagacctaatagacatctacagaattctccaccccaaatcaacagaatatactttcttctcagcaccacatcacacttattctaaaactgaccacataattggaagtaaaacactcctcagcaaatgcaaaagaatggaaatcataacagtctctcagaacacagtgcaatcaaattagaactcaggcttaagaaactcactcaaaaccacacaactacatggaaattgaacaacctgctcctgaatgactactgggtgtagaatgaaattaaagcaaaaatacatacgttcattgaaaccaatgagaacaaagatacaacataccagaatctctgggacacagctaaagcagtgtttagagggaaatttatagcaataagtgcccacaagagaaagcaggaaagatctaaaatcaacaccctaacatcacaattaaaagaactagagaagcaagagcaaacaagttcaaaagctaccagaagacaagaaataattaagacgagagcagaactgaagaagatagagacatgaaaaacccttcaaaaaatcgataaatccaggagctggatttttgaaaagattaacaaaataaatagactgctagctagactaataaagaagaaaagagagaagaatcaaatagacacagtgaataatgacaaagggaatatcgctactgatcccacagaaatacaaactaccatcagaggatactataaacacctttacataaataaactagaaaatctagaagaaatggataaattcctggacacatacaccctcccaagactaaaccaggaagaagttgaatctctgaatagaccaataacaagttctgaaattgaggcagtaattaatagactaccaaccaaaaaaagcccaggaccagaaggattcacagccgaattctaccagaggtacaaagaggagctggtacaatttcttctaaaactgttccaaacaatagaaaaagaagaactcctccctaactcattttataaggccagcatcatcctgataccaaaacctggcagagacacgacaaaaaaagaaaatttcacaccaatatccatgatgaacattgatacagatattctcaataaaatactggcaaatcaaatccagcaacacattataaagcttatccaccacgatcgggtcagcttcatccctgggatgcaaggctggttcaatatacctaagtcaataaacataatctatcacaaaaacagaaacaatgacaaaaaccacatgattatctcaatagatgcagaaaaggccttcaataaaattcagcaccccttcatgctaaaaccactcaataaattaggcattgatggaatgtatctcaaaataataagagctatttatgacaaacccacagccaatatcatactgaatgggcaaaagctggaagcattcccttggaaaaccagcacaggacaaggatgccctctctcaccatttctattcaacatggcattgaaacttctggccagggcaatcaggcaagataaagaaataaagcatattcaaataggaagagaggaagtcaaattatctctgtttgcagatgacatgattgtacatttagaaaaccccatcatcttagcccaaaaatgccttaagctgataagcaaattctcaggatacaaaatcaatgtgcaaaaatcacaagcattcctatacaccaataatagaaagagagccaaatcatgagtgaacttccattcacaattgctacaaagaaaacaaaatacctaggaatacaacttacaagggttgtgaaggacctccccaaggagaactacaaaccactgcacaaggaagttaagagaggacacaaacaaatggaaaaatattccatgctcatggataggaagaatcaatatcctgaaaatggccatactgcccaaagtaatttatagattcaatgctaccccatcaagctaccattgactttcttcatgaaattagtaaaaattactttaaatttcatatggaaccaaaaaagagcccatataaccaagacaatcttaagcaaaaagaacaaagctggaggcatcatgctacctaacttcaaactatactacaaggctacagtaaccaaaacagcatagcactggtaccaaaacagatatatagaccaatgaaacagaacagaggcctcagaagtaacaacatacatctacaaccatctgatctttgacaaacctgacaaaaacaagcaatggggaaaggattccctatttaataaacagtgttgggaaaactggctacctatatgcagaaaactgaaactggacccctttcttagaccttatacaaaaattaagatggattaaagatttaaacataagacctaaaaccataaaaaccctagaagaaaacctaggcaataccattcaggacataggcatgggcaaagaccttatgactaaaacaccaaaagcaatggcaacaaaagctaatattgacaaatgggatctgattaaactaaagagcttctgcacagcaaaagaaactatcatcagagtgaaaaggcaatctacagaatgggagaaaatttttgcaacctatccatctgacaaagggctaatatccagaatctacaaggaacttaaacaaatttacaagaaaaaaacaaataacctcatcaaaaagtgggcaaaggatatgaacagacacttttcaaaagaagacatttatgcagccaacaaacatatgaaaaaagcctcatatcactggtaattagagaaatgcaaatcaaaaccacaatgagataccatctcacaccacttggaatggtgataattaaaaagtcaagaaacaacagatgctggagaggatgtgaagaaattggaacacttttacactgttggtgggagtgtaaattagtttaaccattgtggaagacagtgtggtgattcctcaaggatctagacccagaaataccatttgacccagcaatcccattactgggtatatacccaaggcattataaatcattctagtataaagacacatgcacatatttattgtggcactattcacaatatccaagacttggaaccaacccaaatgcccatcaatgatagactggataaagaaaatatggtacatatacaccatggaatactatgcagccataaaaaagaatgagttcatgtcctctgcagggacatggatgaagctggaaaccatcattctcagcaaactaacacagaaacagaaaaccaaacaccacatgttctcactcataagtgggagttgaacaatgagaacatatgggcacagggaggggaacatcacacactggggcctgtcaggggctggggagaaagaggaggggtaacattaggagaaatacctaatgtagatgacgggctgatgggtgcagcaaaccagcatggcacatgtatacctatgtaacaaacctgcatgttctgcacatgtatcccagaacttaaagtgtaattaaaaaataaataaataaaagcctgggtgtggtggatcatgcctgtaatcccagcactttgggagtccgaagtgggcagatcacctgaggttgggagttcaagaccagcctgaccaacatggagaaacgccatctctactaaaaatacaaaattagctgggtgtaatggcacatgcctgtaatcccagatactcgggaggctgaggcaggagaattgcttgaacccgggaggcggagattgcagtgagccgagatcgtgccattgcactccagccaggtcaacaagaacgaaactccatctcaacaaaaaaaatataaataaaaaattttttaaaagcagaagtaggattacagaaagcagagaagcccaaaagatttgaatgttcactgacaaacacagcaataaagtatttgatattgcaggcttcatttgaagtaaagcttcaggaatacctggaaaccaagctacaggtggcactcagctccctaaccagcctttgccaagaggaggggtctttccagagacaaccatagagagtaatctttagccatgttatcgtctaatatcaaaaatagggggcaggccaggtgaggtgactcacacctgtaatcctaacactgtgggaggccgaggcaggcagatctcttgagcttaggagttcaagaccagcctgggcaacatggtaaaactacatctctacaaaaaatacaaaaaaaaaaattagctgggcctggtggcacatgcctgtagtcccagctacttgtgggactgaggtgggagaattgcttgagcccaggaggtcaaggctgcagtgaacagagatcatgccactgcaccccagcctgagtgtcaaagtaagaccctgtctcaaaaaacaaacaaacaaaaaaaaaagagggtgtaatggaagtgttttaatatgaccacggcatcctctcactgagatctgctaccatttattttattttgtttgtttagagacaggtctcactatgtcacccaggctggagtgcagtggctccatcatagctcactgtatccttgacctgggctcaagtgatcctcccaccttggcctcccaaaatgctggttagaggcgtgagccaccatgcccccatttgtaatttaagctgataaatgagagcaggggcacaagtctgtatccgctaactcttcagcaacagctgacccaaggccagcaaacccattgcatagccaacaaccaaccagatcctgtctttctgaagacacacagagacagtagtcagatggttatgactaataaggctgtaaggttgtttagactgacaattggtagccatgctgggcaaaagggaaagaaagaaaattaagagaaagggaaaagagagagaagtgccatgcagcccctgagtgacagagagagaaactcagttctgacagttttccagtttcaaaacccaaacctgtaaagttgacccttgaacaacacaggtttgaacaggtccacttacccatagcttttcttctgcctctgccactcctaagacagcaagagcaattcctcctcttccttctcctccttgacctattcaacaagaaaatggcaaggatgaagacctttatgacctttctcttccttatgattttcttaataactttttctctagcttgctttattgtaagaatgcagtatataatacatataacaaacaaaatatgtgtttgttgacagcttatgttgttggtaaggcttctgttattagtatcctgttagtagttaagttccgggggagtcaaaagctatgtgtaggccaggcacagtgggtcatgcctgtaatcccagcactttgggaggatgagacaggcggatcacctgtggtcagaagttcaagaccagcctggccaacatggggaaaccctgtctctaaaaaaaaaatacaaaaatttgggtgtggtggcacacacctgtaattccagctactaggaggctgaggcaggagaatcccttgaacccaggaggcagaggttgcagtggccaagatcgttccactgtactccagcctgggcaatagagagactctgtctcaaaaaacaaacaaacaaacaaacaaacaaaaacagaaagttatgtgatatgtagacgtttgcctgtgtaggacattggatcccctaacccttgcattgctcagaggtcagctgtagcttctgtacaggcttgggttctatacttgccttttctcttccttacaaaaccaatcaaaatgagtttcttttccctgtaactaaatttccttgactagaatattgattactgccaattcccacctttcctgtaagttgtaagttttagaatctggttgtttttttttattgggaaatacaattgatttttgtatgatcctaaaattgctgaactctataattgtttatttttagattctgtggaccttttaggtagttaataatcatatctcatgcttcaaaacccatgtaccttgtgttagaataagataggataggataggctctggtaacaaataaaattccaaatctcactacctaatgcaataaaagtgggaaagtcaaaggtggatttggctgcccttctccatcttatatcagtgtcagatcatgataggggaagagcatgctgcagagttctgcaagaagcttttaaggtccagacctggaaatagctgacattccttcttctcacatcccattgataagaatgtctcataacctctctatttaggggcagggaaactagcaactgcgaaaaaagtaaaataaatgaatatttggtaaattataataatctctgctgcatagctctttttatttccttatcttacattgcctaggattaccactacaataataaatagaatgcatctgtcttatttgttatattaacaggaagactgctaaagttttatcattaagtatgattttgctatatgagtgctgaatttttctcttgagatgattaaatgtaaaacaacttttctaagggctaaatcctatatggtcattgctctggactgaatgcagttgcccactccctttccaaatccttacaatgaaatcctaaccctcaatgtgatgttattaggaagtggtaaggggacaaacaagtgaagagacagatacactagagtataagatctatcaagtaataaaggtggacctgtgagtaaattcaaaccatttttctctcttgagtagccatgcttatgacaaagaaattttgaatgccttgtgggttgtttgtttgtttgttttgagatggagtctctctctgtcacccaggctggagtgcagtggcgtgatctcggctaaccgtaagctccgcctcccgggttcacgccattctcctgcctcagcctcccgagtagctgggactacaggtgcccgcaaccacgcccgtctaatttttggtatttttagtagaaacggggtttcacagtgttagccgggatggtcttgatctcctgacctcctgatctacccgccttggcctcccaaagtgctgggattacaggtgtgagccaccacgcctggcaagaaattttgaatgtcttgttttcaacaaatagttttaatttaaatcgaaaagagtgtgtaggtatgagttgcgaatttgtaattcatttgcgattctggtattgatggattgtcttatcttgtacaggtcatttgggccctatggactttaggctcaacaacaaaatcagacagttggagtacagtgccagtcacaatttttagactgtttaaccctaaatgtctttctaataggccttatttatatgagaacattttatagttaaccacaaatattttgtctgtgtttatcaagagttacaagcatagcagccctttctttactgaataaaagttcaaacaaattggattcatctttatttggagctgccaattaaagtgggatatagtatagttaagcagtactcaacatgtaggccactaatctcttagggtcccaaacactctttcaggggctctgccagggaaaaactatgttcatactaacagtaagaacttacatgtctttttcaccttcatccccttcatgagggtacactacagtggagttttccagaggctccatgatgtatgaggatgtagtcactctgctggctagtcgtatacatgtctcagtattcttttcctttaaacacttctctactttaattttcaatatggtactattgatcgatataaagatcagaaacaaaagttctttgggatcttcagttgtttttaagaaacaggggtcttgaaatgaaaacactggaactactaatacacttcacaagtacattttacctccacatagcacagaaataaaatcataaccctgtctcttgtcagcagtatgactctaggtaagacatttaacttatctaagcctcaatttccttatgtataacaatacaaatctcctagcttcatgtgaagatgaaatgggatacaccaagtctgacatagtaggagcaaaaactttgctcacaaataatctaccttaggaaggatagacaagaaaatggtaaactggttgggtgcagtggctcatacctgtaatcccaacaatttgggaggccaaggcaggtggattgcttcagcccaggagttcaagaccagcctgggcaacttagtgagaccttgtatccacaaaaaaaaatacatatgtgtgtgtgtgtatatatatatatatatacacatacacacacacacacacacatatatatatatatatacacacacaaaaattagctgggcatggtggcacacacctgtggtgactcaggaggctgaggtgggaggattgtttgagtcttggagacagaggttgccatgagccaagatcatgccacaatactccaacccgggcaacagagtgagactctgtctcaaaaaaaaattaaaaacgaaaagaaaatggtaaataaataacttttgttaccataagggaggagaactaaacaactggggcatgggggaggagatggggaacttttcattgttgctgcacccttcacttagaaggtccagtttatgaaaagtaataatttagttaaaaccttcaaaaatgatttttaaagaatttccctgctcctcatagatatagcctggtagtttacataccacttcattttctatgaagtactgttgttgcaaatttatctatgcaaagagctaagcatgcaatgattgttgctgtgggtataaaatactgctttgctaaggatactgtagctaactcacagttaattggctgaggcctgagcacacccatatcagtttgccatatacagatttttggttaacttgatttccatatgcaaagtgagaagaaagttctaattcatatatatatatatatgtaaaatatctttctctcctgagtcatcaatctctacctcattattgaaaaattgccatcaatataaaaatatactcctggtatctcccattttttaaatatgtgactccacgggcccctccagctaccatctcctgttcctgttcccctttacagtttacagccaaacttctcaaaagaatatattactattccctgtttctacctctacacatctgttctcccttccacccactccaaccaggtttctgtccttatcactccattaaaaggctcatatcaagacgatttgccacgaaatcaagagctcttcctatgcacagcttccttaacatttcagcagcatttgacactgcttaccacacttctttaaaaaataccctcttctctcagtttcaaggagaacacactgtattggttttcttccctttattgtcctggtctcagcttctattactgatttcctttcggctgctgtccaagtcagcctcatcctgcatctgccactgagtttggtcctgagctctctcttctacttgacctacactctctccttagactattcctagactcattcaagtctacttcttagacttcactctacattcgcttcttcaccccagcccttcagcttaaattctgtccatattcactgataatacaaatacttttgaacacttactctagcccagccacaattagaggcatttggggtttagagagaatgaagtagatgcaggcctttgactctgtggagtttacattctggcaaggaaagacagacaacaagcaataatcataaaaaaatatggtatgttagaaggtgatgagtgcttaagaaaataaatcaggataaaaagaatcaaaattgggaggagacagggaggagagtgggtcagttgcagttttaaagaagagtggctcattgagaagatgagctgaagttactcatgcaaacctatgcataaagtgggttgcaggcagagaaaacagccagtacagaggcctcaaggcacgagcttgtttagtatgttttaaaattttcaacaagactagtgtggctgcagtgcagttttcccaggggaaaatgataggagacaatgtcagaaaggaagtggaagggtgggcagaaagaacaggctttgattatgaataacttgaggaactagaacagggttttgagcagaggagtgacatgatctgacttgtgtccaaaatacacttttgctatgtggacaatgaggatttaaggttaaaaataggctaactggctgggcacggtggctcacacctgtaatcccagcactttgggaggccgaggagggcacatcacaaggtcaggagttcgagaccagcctggccaatatgatgaaaccccatctctattaaaaatacataaattagcctggcctgttggtgcttgcctgtagtcccagctactcaggaggatgaggcagaagaatcgcttgaacctgggaggtggaggttgcagtgagccaagaggctgcactccagcctcagtgacagagcgagattccatctaaaaaaagagaaaaaaaggcaaactgaggctactgcagtgctgagagtgggaaagtatggcttggatcagagtggtagtagtagatgtggtgtgaactggtaggattctggatgtatcttgaagttaaataaatccagtcctatttcctaatgagtagagtagatgtgaaaaaaaagagaaaatgaatccaaagtttttggcctaaacaactggaagaatgaagtcgtcatcaactgaaaaaaagggaagactgcaggtgaagcagcttttctaggtacatcagaatcatttcagtcagggagactgaacactatgggttttgagatagaaagtttattattattgttcattagagacagggtcttcttatgttgcccaggctacactcaagcttctgggctcaagcaattcttccaccttagccttccaaatagctgggactgcaggtttgcatcaccacacccagctaaagatgagcgctttctctaggaattagaccttacgcaattgtgggaatagctgggaaagtgaagatttggggaggagagtaagaagatgggtaagggagttgccaccatgcccattcaagaagccaaggatggccagccaccttagtgtccctaccacagatgcctatggagaggtctatggaaagcaactcctctgtttagctaccatctctgtggggccagcactaagtgtcaggtggtagacctgggccactattggttaaagagtcagcagctggaaagaagagtcagattggagtagaggagaatgaggacaatctggaacccacttgcacctctgtgtctattcatcttcacatctaacttcaaccaacttcgaagagtaatggccactgatttactttcattctccaaattgtatgtaaatgtatctttaatccagaactagatagagaagatatattactgctatatataacaaagtacaacaaacttagtagcttaaaaacaatttctacttgttatctcacagttcccctttgtcaagagtctcaggccttttgttcgaggtctcataaggctacaattagggtgtctgttgggctgtgttctcatccggaggtttgaatggagaaacatttacttccaatctcattcaagttgttagcagagttcatttctcttgtgtgggaatgagagggaggccctggcttcctgttggctgttggccctcatgtcctagagaccacctagttcccctccacaggggtccttcacaggccctctcatagcatggcagtttacttcttaaagaccagctgaaggatttcactttcagtctgctgagatggtgtctgccatatttatggcagtgacatcctagagttttgccattttctattagttagcaacaaggcataggccctgactgcactcagggggagggagaatcacacaagggcatgattcattgcaggggtcaccttaaggtgtgtctcccacagaaggaattctgagatatgcagtttcaccttaaccaatctgacataatacaaacttcaaaaaagggaaaatcaagagatcatatggagacttgttaagtttcagatgtattagacatccaaatgaagaggttaacaagacaattggatacaagactggattttgggagatatgtccaaggaccctcaaatgtgtattcctaattcagtctcttcccaaaactatagtttcattggtctgtctacttgacatcttgaacttaacaagaccaaagttgttccttcccttcccaaatctgttactgctcagacttctacatctcattaaatggtaccctcacctaccctttctctcaagaagaaaaacctaagagtcgtccttcattcctctctttcccttgccttctacattcaatccatcataattctattggttctacattcaaaatataaatctatccccttaattctatgtctaccattaccaccctagtccaagccactattaccccttcctggccttcagcaaaagcctttgaatgtctcccctccctctcttgacccatgttatgaaatggattgtgttcctcccaaaatgcatacactggagccctaacccccaaggtgactgtatttggagatagggcctctaggaaggtaattaagcttaagtaaggtcataaagatgggaccttcatcctataggattaatgttcttataagaagaagagacaccagagatatctctctgcatgcacacaaagatgacacggaaacacatccagaagacagctgtctataagccagaagagaggcttcaccagaagccaaccatgaagacaccttgatcttagacttctaacctcaagaattgcaagaaaatgaacttctgtgtttaaagcaactcagtccatggttctttgctatagcagcccgagtagacaaatgcaatggcctccatatattgttcacacatcagccagaatgagttcttcaaaacctagattaaattgtgtcacacccttgtttacaggccttcgatagttttccactgaaattggaatcagacttgaactctttaccttggcctccaggattgataccatctagctcctgctcatccttttgaccttctcttgggccattcttctctccatcacccagcttggtcgcactagctcctttctgtcaacaaaaacaccaagtctgttcccatcttagagtttctgttctgctcttgctcccaaaactttgtcccctgattcttcacacagatggtgtttttctgcactcttgcctaaatgtaacttcttcaaggacctttcttacccgcccttgtaatcaagaatttcattcactcttccccaatacctaagcccaaacactaattagtgcaccaccctacttattcccttcataatttaccacaatttccaattctctctctatgtcttgatctctctatctccctctgtttatatattgcccatttgtcctcctttataatgtaaaattcgggaaggtaatgaccttgcctcccttgctttctattgtatcctcagagattaggagcatgcctagtgtataagaagctctcaatacatgtgtgtttaatcaaggcttaaataaatctaaagctatggcccaaatgaaaatttttatatgagttttagtacagttttgccactatttccatagaatagattatcagagtgaaattgctgggtcacagtgtatgcacatttttaattttgatagatcagaagtactgctttttaatatttagtgtgactgatttgccactttaaaatttaattatcacaaatttaatttttttcctcttctcctttgaaaaatgaggcatttcaaaaccatttttcccccaatgtttttatggtaactgaagcatcattgttcattttgcaataactctagcttttgctttataggttaaattgatacagccaatttgtctataaagaaaatgtctgtgaattgagtcttctttttgaattgacccctccattacaaaatgaatgatgtattctaaagagaggaaaaaaaaaaccttctcccttttcacgtatcattcttcttttctgagtgtagagagttgttggagtaaaagcattaaagtgatcccagtgttaatatgtggatcctccaagctgaacattttaagtttgaaatttacaattgttataacaattgtcccctgcctaatccattaggtgacagcattagctagaacccagagctaggaatgctttaacacttatgagtacatttgagttggcctcattgttacccagtcgtcaatagtgtccttaacatttccagctgcctcatcactgtttgatatgtacaaggggctgggacaagggtgtagagggttccactcaaacatgtccccagtatcaggagaaaacacacttcaggaaggcatggttctgatagtgggtcaggaaagaaaataggaaaattggttttaacaccattcagttattatacttcctgcctcaattgaaatcaaaagaaaaatccttgtgtctaaagaataattacaaattttgaaatagagtgaacgttccataaagaaaattttaaatcttttttctaagaaaatacttttcctattaccttgtgcaaatggcaatctatacttattggctgaataataattgagttaattaattaattcctggcagatttattatttcattagtcactgaccatgatctataccacgatagggtgaaatttaaaagttcttccattattccttcaaattgcattgcagagctcttcacacataattaggtcttaaattttttgcctaatgttacttattgtttcctaacaaatgcagttcaaaaactttagagtgacattcacagccctctttagtcttatcacaatcccctttccagccacaatccctactattcccctgcaaccatcacacttctgctttgttgaactgccacccaggtatctccagaactttctactgttccttcttctaatccttcatctatttttatctgctcaaattctacatctttcctgacctggatcaaatgccacgtctcaattaagtcttccccaagtcctcaccccctttcttctgaataacaagtatttccttagtatttctctggtgcttattatagcactgccacactgaattgtgtgtatgtatatacattattgatttgctctattagattataagttcctcagagtcaagagtctgtgttacccatcttgtatcttccattgcaattttatagagtcttttgcataaaagatgctcaaaaatgtttaaagaagtaaaccagctgctgagaaactgctaaatgtttgcactgagcattttggcagctgtgtcatcccacttggtgatgctgcctagcacatacacactaaaacaataggcctgaacactaaacaataggccatggtcctaaagggtattttgttctacctttcttgtattgtgagttgatctttgattccggagcaactctgcatgtacgtgtttgctgtcaaaataaatgtcttttttgtctcaccagctgagatacatttaggtgaagatggcactggtaaaggaagtgtgcaggtgaagttggtgaaaatgttctgacaatgtttatattttgcaggcttggaagtctcatgccaagtgaaccatggataagtattcaagtttgatatttgcctaatgcgtggtaaaaaaataataataataatttctgtatcaagactgatttgatggccaggctctgtggctcatgcctgtaatcccagcactttgggaggccatggcgggtggatcacctgaagtccgaagttcaagaccaacctggctaagatggtgaaaccccgtctctacttaaaatacaaaaattacctgggcgtggtggcgggtgcctgtaatcccagctactcgggagactgaggcatgagaatcgctcgaacccaggaggcggaagttgcagtgagctgagattgcgccattgtactccttgcatttcagcctgggcgacgagagtgaaactccatctcaaaaaaaaaaacaacaacaacaaaaaaaaaaaactgatttgaattttgcaaaatagtattagacataaatatgttgatcaacttttggggaacttaaaggttaactttataaatggagaggaaaaatcgtcctgcagaatccacgcctcaaattatctggctttcaaaaatctagaaaaatattttgtgttgatttgtctacattacgacatataaaagtcatccaattgcctggatgtactctatccaaagtcatggcttttagataacagttaatgggagctcgaactgcttctcacattttatttgtaatctaaatcagaaactctaggtctcaggtataatcattccttatcattaagacaaaataaaatataattaatgataaaggatctcggcagttcaacttaagaatacagaggttaatatacttaaatctagattcttctgaagttctctttgcacaaaaaggtgaatttttgatgtgacttattctctggttcttggtattcatcataactaaggaggcaagggaaccccgtgacttggttgggatgcagaagccaaaactcatccatttcaggataaagagcccaggataagggagaatcataaatgaaagacaaagccagaagaaatcccactggcttagaatgaagttgatggtgaccaggaagattaaccctttccaaaatataatatggacacgtaatactctgttgatgaacacaagagtgcctatacatcattgttttggttcattactgggagcagggtaaaaagattcctaaggtctacagtaagtgagcttagtgaaaatacaccccaaagaccagagggaaagctctggaaactgctggatcatcagatcaatagactcaaagatgactaagttgggaagctttatgcagtttaaacatttgtgcagggagtatccccacacagccttttattgacagctacagatcaatggtaatttttgatcattttcaacttacataaacctattgaccccatggccacctttggggcacttcaagtcatcaaaaataatcagaggagatggtgtaaaattgtcagactgctgaagactccaagtagttgcatatgtccccaggagctgagtcgagaggttaaaatatagttcaaattgccagcagaacctcaactgacagagtgttccagagagtcttgtctttatgtctcataaaatgaggcactgatttgtatccaaactctgaccttcatgcatataaagttaaagaaggaaaaaagaggctgaatcccattgaagatattagattgcaaagaatggattattcctagtaaaatatttcttcctgtttttctttgttgagtcatcttcttcatctgctgcctaacaaaagtagctgacatgcttgtagaattacgtacaatatggacgtggacatagaatgaacaaagacaaaacagaagcaagtgcaaggtggcaggccagaagtcagggacaacaaaaaatgtagtcaaaaaaatcattaggaagagtgaaaggaaggaaagagcaaaataatggcaataaaggggaagaagtaagagtattgaattaagataatctctatagaggaaaaggagtgagagaagaaggaaagggtgaataagaagaaagagaaaggaagaaacggaagaaaagtgaagcaaaggagtaaaaggaaggaaaatcgtctttagtgatgacttttcctagttagtaagacagaacgctacatctccaaaggaaggaactgaatccaaaacatctaagatccacagtgctcaagcaaatatcctaaatttaagaaaaataacaagaaacttagtacgtaaatgagagccaacccaattcacagagtgaactgcatccaaattttgcagcaggattctaaaatagtgaactttgatgttggaaattcattcaggagagaataatataaattatttcctaaaacgtcaaagaataaattggcaaggattatcttgtcatttttatgttttcttcattttttaatatagcttttactaaacattgacaaaaaccatggctattgtttagatctatttaaggagtctatatgtggtttgtgtgtgtgtgcgtgtgtgtgtgtgtgtgtgtgtgtgtgtgtgtgtgtgtataaaactattcaggaataacaaagtagccagatgcagcagtggcttgcacctgtaatcccagcacttttgcgcagccaaggcagaagggtgacttgagctctagagttggagaccaacctgggcaacatagtgatacccaatccctacaaaaaaaggaaagaaagaaagaaaagaaacattttgttttaattagccacacacggtggtacatgactgtagtcccggctactccagaagctgaggcaggagaatcacttgagcccaggagttcaaggctgcaccgagccatgatcatgccacactccagcctaggcaaaagagccaaaaaataagaataataataataaattaaataaataaataaataatgtaatatgagaacttgtcctcagtataatttcatgatacagaaattacttttacatcccaacatgtggttatttctctcccttttttttttagatacatgtagaccaggttaagcaaaacaactgttgtaatgaccctttgtaggagtatacccctaaaaattttctgtgccaggcatgcatgaacttcagcttgcaacctacaggccatatttctatattagatggtggaggtttggaagctagggcattttgaatacttctgctttcaaggatctgagccgtaaatgtttattaaacgaatctataatgaaatcagttttgttatttttttaatggttgcctggagtgtgttggatgactgaatgccagttgttaatcattaagtactcatgttaccaaaagtgtttgatagtattgccatctaggggctgaatggaattctcagctctgaaataaattataattgagcaggtgcagctattgacaatatacatatgtttttgctttatagcccacatgcttttcatgtttcttatgacaaaagcttatgaaaaaatgtcccccagcagcccaccttttttatatataatctgttagaggtgattactatttgctttggagcgtatgcttttttggcatctattactgaatattctgaacaaagaattattcttttttgcattattaatcttgcccatgtttgccctatttccacagaaaaggaatcatttatcagaaaagagtgtttgtaatcgggacttgtagcatcttcagatttaatattcattatggtcattctagttctgtgctatatttatctaaaaggccaatccaatgttatggagaaataagtttttaaatatttatgatctaacttttaatattttaaaaaagagaaattagtatttctgtaaaatttgtttcagagtctgattgctcagcaaatgtttaaatattaaaagatttcaagaggttagcgtgtaatatcataatgggacttattgaaataggaaaattgactttacaagtttttgatatgtgaaggaaattgtattttctctgcctatgtttaacacataacaagaaataacacagttaaaatatacagccaataatgtcagaaaacagcaccaaaacctatttctacattgttttgtttttgtctaaccagtttgtttggaaaacaattctgtttgattttgtcatcttgttttagattttatccaaaatgatatttggatgcccccacacataattttttctgatgttcttgggtgcctactttcagaaataactttcactactccactttatattcttcttcccttgttcatcaaggaaagaagacaattgaagaccatgtatcacattcaaacatctaataaaccaaagcagatcattgaatgtaaatatcctactaacccagtcaaaactttctcatgatttcttatatccaatggggatggtacgcaacagaaaatgccagtgtgtgtgtgtgtgtgtgtgtgtgttcgtgtgtgtgtgtttacctatgaacacattactaccccacttgcatacataattcctactttaaaaggacatatcctttcagtccagatgtggaaagagcaccccagggcctttagaaacattaggattcttagctccagtttagttatgccaaatatgttaatgctgctctccaagcagaaaaacaaacaaattttaaaaatcctaattaggctatccctttttttcttttcttttaaagcaacaaagaccaaattctccaagcctagctaacaattacttttggtaggtttcatagttttacttatggtgcttttaacaaatgaaaatatttttatatctatattaataatagacttctctaagggtgtttgtacatgtatagttgaattggcttgttactgttttcttgtgtttatttgttttattgaattcgtaagatatatatacatgccaagagaatgagagagggagactgggaagatggagagtcttgtgtacaaacagatttggaaattaggggtgttcaggttaactctccaaacccttaatattaacctggcaggcaattatcccagtctcagacatgcagcttggcaccactgatttccattttgagctggatgcagcactgatctgaagcatcatgttttgtttttttttttaatgtttatatatcacacgctttgggctgcaagcactgaaaagtcaaggatgctatctggtccactttctgagtgtctgaaatcatacaacattgggtaatatattcacggtgtcaacaagaataagaaaaaatgcgttgttttcttaatgataattcaaaactctgctgtagtgtttgcgctgctgttgcctacaagctttggccatgaggttcagagaatgactttccagcaatattgtcagtttcaaaaaaaaaaaacaacaacttaacctgttaattttcttacagggaacaagccatcaagcccacctgtacgggttagaaccattcacaacatatcgcattggtgttgtggctgcaaaccatgcaggagaaattttaagcccttggactctgattcaaaccttagaatcttccccaagtggactgagaaactttatagtagaacagaaagagaatggccgggcattgctactacagtggtcagaacctatgagaaccaatggtgtgattaaggtaatgtctaccctgcataagaaattatgtttggtgttctccagataaatagatgagccctgacatgccatcaggtcactgtgggaaaactcccttcacagcctgtttaattctccttgatagctcctccaggcacttaatcatagatcacagaaacctagcttagatgtgtgatgcttcctataacccaacactgagctaaatgctctccatggattatctcatttaatcctcacatcaaccctactaggtgggtaccaccaaacctcatgaggcatatgcaggctaagtaactgcccaagcctacactgtaagtaattgagttgggatttgaagccaggaactcacatcagaactgaactctaaatgactgtgttcttactgcctcctgaattaccctacccagttatttgcttaagacttgcctaatttatgcttcaaacagagctcattaagcaagccacaggtgtctgctaacttcccaacttctgtatgtagccgtgagaaacaatgttataaatgttgtatacgtatctcaagctctgccagcccatgagtacagggggactgtattttcatgaatagcctgcattttgatgttttgaaccttcagccacacaaaaaccagccttcatctacctctctgatgttcctccccaaggatggtggcagacatacctgttagttcatactactgcctttacctccagtctctcctggccgtggtccatctcttaggccctcatcaactaccttctgcgggctgggactgcagagtcccccagcctgcagctgctatagacacactacccttttctttgccactccttctccaagaggcagactcccacatcaattccacatcacagggttgagactaagctgttacttttaataaagcctccctgaaaaccctaagagagggatgacagcaggaaattacgtgcagcaataactaagaactgtaactagagctcacagtcccaggtccatcctgtgggctgcctctctgcctagcttcaaggcctgctgcaagtagcagtagcaagctgcttcccaccagcctgcctacatgtggacagaagccagacttctcccccctggggcaagaggcttgagccttaggattcatgaccttaaaatccaaatcacggccccaaggcacccatcagaaaagaaagctccttttccctcaaagcacttctccttgtgggtatttggagtcatgagagcatctgcttcttggtggcataattgacaataagaatattgactccttggacctttatttacatttcaccaaatattaagcaaatatttggtgaaatacttctactaagtgccatatacttattcaagagtgaacaagacagtcaggttccctgatgttacagaccgtgtgtgagtgcacgtgcgtgtgtgtgtgtgtgtgtgtctgtgtgaataaatgtggcagagtatatgaatggtgggggtacagaaaagcaaacaataagctagtaaataaataagcaagggaattactgagagcgatgaatgctataaagaaaattaaatagaataatgtaattatgcctgctcaggctattttagaatggaatatcatttgaatcaagttgacatttgagctgagtcctgaatgacaagacagagttagtcatgtgaggatatgggggcaaaatgttccagacaaaatgaacagcaaatgcaaggcctgaagccaggaatgaacttggtgtattcaaggaaagagaagaaagctagtgtgtatgaagtatttgggagaaagaaagatggcactagaagaggttggagggactggtaggagacagattgtcccaacattgtaggctgtggtaaagtttagaatttgttccaagtgcaatgaaaaattactgaaggctttaagcaaaggaatagcatgatcaaatttacgtttttaaaaatcactctggctaccctgtggaaaatggactatataaggaccaatggagtttgagaactattaaagatttcaaggtagaattgaaggtgggtcaaattagagtagcagttgtgaaatcatgcactataggtgaatcgaagatacattcagaagatagagatgacaaaatgtgttaatgagctgaatgagagacatgaaggaaagggagcgctttgagatgagttttgggtttaggctttgggctattgatgaggaaggggagactggaagatgaacaagttaggagcaagtagatagtgtgaggtacaagtctaaaactcctgagagtgttctttgctgggataaatgttcagaatccgttagcaggtggatgttatataaacccatggtgccagaggagatcagctatggagagaatgtaactcaacctgttgagagtctgggatcaagccctgaggcataaatgtgggggtcaagaggaggaaagagagccagcaaagactgataagagggaactaggctagaaggaaaagtgcatgagtggagtgtccaaaaagagaagagaaaatatgccaaaatgttgctgagagcagaagtaaaatgaaggcagagaagccaccccgagtatagaaatgaggaggtcactgtgatctcgacaaggagagtatgcagtagaatgggaaacctggttggcatggctggttgaggagagaatggcaagggaggaagtaggacatcaactcattaaagccatttagatgaaaagaaaagcagagaaatggagcaataggtggagactgtgggatgggaagttttatttaaaatcattgaaaaatactagagtacatttaaacacgaatagaaataaccagtagagggagataaactggtgacgtaggagataatgagaataacggcagtagtgaagtcttggggaaggaggaagggatgggatacagcgcttaggtggccttcagtaggtacagagatatttcattcatagcaaaaggaggaaaagcaaatcatgtaagtctagattcacatggatacagaggtcagaatatataacatggaggcattcttctctaactgcttctattttcagtgaacgatgtggttatgtcaacaatcaatcaacggtgagggagggaagagggtgttagtggttaggggaaaggaagaaatatgaaataatcacctgggaaaatgacagagcaaaagcatgagggaataaaataggattacaaattggtaatcgcctatttaaaatgtatggatagaagtttaaagtgagaccaataaaaatgtttgggtgtttttctacaaacccatttcagagcttgagtatagagggacagctaaattttacactaattagagatttgccgggtgaatatcaggggcagcaaggggtgcttggggggtcacagaggctgcaagctagttatggaacctatgctcccttcagaagatatggcagtccccttcccacatgggggtggtcttgccctgggtcctcaacaagaaaatcacaccaacatacaacattccaacataaagaggtttccaaacttctaggctgtgtaatcttagggaaaaaatggagtatgttaacaatttagtctaaattaagcttgcccaagaaccacttctgggaatgtttcaagggtgtgccttccaagggctgtaaaatgtgtcctgtcccctcttgagagtcaccatgatagggagtcatcgaaaggagtgtgtcatctctctcaggtttgttggagcaggaaaaggttggaaaatcactgttcaaaaacacctgcattcagattaacttacttcccatctttcaaaaaaaatgaaaacttgctctacatttgtacagtataataagcattcagatgtttttttccagaacaaaagactactttgcccccaaaggagcaatcagttcttccatggcctggaagagaaaacagggtgtttttttccatcccctagtcataaagatttatatacatgtatatatgtacatgtatatatatgtatggatatttgtacttatgtataaaatataggtgtctgtgtgcctaaacacacacacacacaagcatactctttcagccctggcactctgtaacaacaaatgattaagcgttgtaattccatttcccagcaaatgccgtggaaggtagaccctactttagtcagtatgagatcagaagcagttcatatccataaaacaggagactttaatactattctctactttaaaaaaatacaaataggagaaaccttgtgaataccatttaagtcaaagaatctgattcaatagcccttagttttgagataaatgtttatgtagttcccaaactgaaaaaaaagaaaagaaaaaggcaaagaaaaacattgtttgtctctctgtgggccttatgttaactgaaaaaaatcacatatccccaattaatatcagaatacttcttctaaattagggtcatcaaaataaggaacaagggggtgaaggttaaaaaggggctaagtaactacacaaagaaattgtatgctgcaagttatcccttttgcttctgtccttctgtagacatacaacatcttcagtgacgggttcctggagtactctggtttgaatcgtcagtttctcttccgccgcctggatcctttcactctctacacactgaccctggaggcctgcaccagagcaggttgtgcacactcggcgcctcagcctctgtggacagatgaagcccctccagactctcagctggctcctactgtccactctgtgaagtccaccagtgttgagctgagctggtctgagcctgttaacccaaatggaaaaataattcgctatgaagtgattcgcagatgcttcgagggaaaagcttggggaaatcagacaatccaggccgacgagaaaattgttttcacagaatataacactgaaaggaatacatttatgtataatgacacaggtttgcaaccatggacgcagtgtgaatataaaatctacacttggaattcagctgggcatacctgtagctcttggaatgtggtgaggacattgcaagcacctccagaaggtctctctccacctgtgatatcctatgtttctatgaatccccaaaaactgctgatttcctggatcccaccagaacagtctaatggtattatccagtcctataggcttcaaaggaatgaaatgctctatccttttagctttgatcctgtgactttcaattacactgatgaagagcttcttcctttttccacctatagctatgcactccaagcctgcacgagtggaggatgctccaccagcaaacccaccagcatcacaactctggaggctgctccatcagaagtcagccctccagatctttgggccgtcagtgccactcaaatgaatgtatgttggtcaccgcccacagtgcaaaatggaaagattactaaatatttagttagatatgataataaagagtcccttgctggccagggcctgtgcctgctggtttcccacctgcagccttactctcagtataacttctcccttgtagcctgcacgaatggaggttgcacagctagtgtgtcaaaatctgcctggacaatggaggccctgccagagaacatggactctccaacattgcaagtcacaggctcagaatcaatagaaatcacctggaaacctccaagaaacccaaatggccagatcagaagttatgaacttaggagggatggaaccattgtatatacaggcttggaaacacgctatcgtgattttactctcaccccaggtgtggagtatagctacacagtaactgccagcaacagccaagggggtattttgagtcctcttgtcaaagatcgaaccagcccctcagcaccctcagggatggaacctccaaaattgcaggccaggggtcctcaggagatcttagtgaactgggaccctccagtgagaacaaatggtgatatcatcaattataccctcttcatccgtgaactatttgaaagagaaactaaaatcatacacataaacacaactcataattcttttggtatgcagtcatatatagtaaaccagctgaagccatttcacaggtaggtagccatgtctcggttttctgagagtaagccactgctgacctttctattgcctgagcccttggtcagttctaatgaagactctaaaaatgggatgcaaggtgtccccaacctccatccacctaaacgtgcatagtagacaaagcacatcctcacccaagcaaagcctgcttgcataacctccagagagcagaattctttcaggtgatgttttgagagtcagtgtttcagaaaggtttgcaatgcatcctggtatctgaaataagtaggacagagatgaggctagtccccctggaaatacgcaggcccctggacagttctgacagccccgatagggtcatctggccagactgtgaagaaaatgatgtattattttaaggttaaaaagtgccaatcaatgagcgcaattaccagccagagttagactaaaacaaaatttgtttcgtgaagagccttcttatcaaatccagcacttcttccaggaataataaggcttctctgactctactttcttatggtttctcaggacagtgccactttgctagctcatgttttcctagcggtcccatctgggctctgtgacatgcatggaagtgcgttgttctccacacaaaagaatcttgcccattgtttaaataattgtttggcagttttccccatcacattttaagtaacttacatccccagagagaagggtaataagagacattttatgcttaaaatttagtaaaatgaacagaatcacttaaaaaaattaaaggctgaaagagtgttgatttccaactacctcaggtaaaattcagctattattgtaatctagtgatgtgtagattagatcctcctataattacctctgatatatagtgctgttgaaatgaaacattcgtggttttatgcatctactcatgacaattatttagggtctattaaatattaaacagtaattaaaacttcctcaggtatcctctgcagctaatccacatgctatgtgagttggcttttatattaccttacactgattcagggcattaaaaaggtccactgtagctgcagagctgtatattctagactggcttcctctttacctgactgtacctccaactttcaaaaaccatatcaatttgctcccttttgaaactcttattcaaaaagtattctagaggtgaaagagtttgtccaggcatgaaaggaatgctttttccaggctggaaagaaaagtttaatttatctgataaattgcaaggatatttaagaatgtgagagaaatctcttcattatccactctaactgaatctgtaagtggcattgacataaaacagagtatcacttctatatgaagttggagttcatgcgtggttttttgtttttgtttttagtggattaatgttcactgaatattgcaaatgtgtgtgtcctcctttcagcacccccagctggtcagtaagaagaaatagtctgggaaagtcctaagtagcagaaggaatccagcccaaaatttaaaaactaccacggataacccagaaaatgaataatctttatgtgggaaatcaaaattgacttcacagaattgcttagaagtcagatctaccatacacagctatggatttgatcaccaataaactggtagccctgtcatggtggagatcggcatgagaggagaaccaggggaggaggagaagaaagtgggaataaaataagtcacaaagggaaaaaggtgtaattaagaaagcaaaaaggtggaagagacagaacatgtacaagaacagaaagcagtgattcaaagagcaaagaggggaggtagaaaatagaagaggaaaaggctagaactaaaaggaataaaggtagaaagaagatagctgggtgcctgcgggaaaattgaaggtgtcataaaatcaatggtggttgggaatagagaaaaaagtgctcatttacagccataggcactaaatactcacaaaaactcattttgttggaaaggagaagtccctgctatgtaaatagaccttttcaagtagcagagaccagctatgaggcaaaacataattgattagttgaatttaactggatggtgataaggtgtcttcatgattgataatctggtgtgtagttgggttaactttggccccgcaaggtctttgtatcatgtaagggaggctgttttaagctgttaggtatcaggtgaggggatttattaccactgagaccgtaattccatgatgttccttcatgacctggaaacattcctgggggatcattccatgatgttccttcatgacctggaaacattcctgagggatcatttagctctagctgcaaaggtaggagtccaggactgctgagaactgcttcatactttctaaggtctgcattcttcattgctatgttaagtaattctgaagagtaccagaattttcatgccggaaagaatcttgagagttatttattccatacatccttgtttaggggaagaattgcactcacccctttcgaacagatcaggaactttagtttagaaagccagggggattttgattgttcaaaaatttccatggaaatataatttttttttgagacagagtcttgctctgtcacccaggcgggagtgcagtggcgcaatctcggctcactgcaagctctgcctcccaggttcaagccattctcaactttgttattcttaagaattagctgtgaataagaatacatgtaagcttgtcttttttttttaaggcctggtgttttaaagattcttcccatgaaaatctattttgctgaaaatcactaatttctgccttatgtcctgaaggtatgaaatacgaattcaagcgtgcaccaccctgggatgtgcatcaagtgactggacattcatacagacccctgagattgcacctttgatgcaaccccctccacatctggaggtacaaatggctccaggaggattccagccaactgtttctcttttgtggacaggaccgctgcagccaaatggaaaagttttgtattacgaattatacagaagacaaatagcaactcagcctagaaaatccaatccagtcctaatctataacggaagctcaacatcttttatagattccgaactattgcctttcacagagtatgagtatcaggtaagaaatgtgtattataaacaattcgagctgattgtttgcacccgtcagcacctgcctgtaaaaatggtgcacaatttgaaaaggcacttaaagaaatgtaggacttaaggagaataataatattccttaaaaatttttaagtggtaaatgaggaaaaaccatgttcattgcctttttcattttcttggtttttgagccatattatatacgttgtttttcttaagtagattccaggtgaatttgcatttcttattagtaaagtggtttctgccattaagattccctctgtcagcgttgccttggtaggagacactccttatttaaagatcactttgaaaataactcattactcgtaccaaaataaaatcaaatagcaaacatctctagcctcggtgctcaagaaagatacagaatgttgaaaaaagtctagaggaatacaactcacctgcccatggcgatgagttaagttttctctgaggatggcctaaaaaaataagactgcattcttaaaaagccaagaattaagaataatattcagaaaatatggtgaattctgtggaggacttctgttaggtttgttttgttttgccatcagagtccatttgcattcttcttgtgataacaacctcatttcctgtgggagaatgtgcttcccccaccctttgctcaggcgtggtgggagtgtcaatcaatgtgtcaggctgtcttctagccaagtggtgggcacatgagccgctcagcccctcagatttgcctggggcttgatcttcagcagagtgactcagaattttaaaaggtggaggtgagaagtcgtgataaaatatccctaacctcaatctaaaagtttttcttttccctgctatttccaagcatggttcttcaaccgttcttttaattccataaactcacagtaaattctcatttgcttaagtcagaatcagtgcctcttgcttgcagtcaaagaaagcttactgactgatgtaagcacttaagtgccaggaacaatgccaacagaaattttctaaaagaggaaactgagccttaaaaagcttattataacatgaaatactaaaaataataagtcaccaaaaagatagtgaccaaatcaatgagtacagtgaatacagggaacattttaagcatgaaaagaatattttaggacaataatgtatgggacaaattaccgaattaataagatttaaaaatataaataaattctcgaatggtttggaaaaatacacagatataaatccataatcccttgtttgcaattccaagtctaaaaatctcttaaaagtattttcttgctttaccacaagtcatttggcaacaaaacccaatctaaacagacttgagactatttacagtatttatttatcccatttaatatgaatatttatatgttttgctacaaaaatattgctttattataagatggctaatcagatcatggtatggatattacaaaatatacagtatatacattttatcctatttcaaaatctaaaaacaaaattattttaaaacacatcaggcccccaagggtttaggataagaattgtggtttatgtcataaaggaacaaaatacttaccgatgccaccatcggaaacgtaacactgttagaaacagccagaacctacgtgcctgcccttttgttcttttctcattacctttattgagaagtgtcacgttatcaagctgtcagttatctagtctcccttacaaataaaaatggtaccttcgtgagagagctggatgaaatcagcataaaatcttcagccgctaattaaacgcaacttaatgacccatatataagaaacacaaactttctctggtattgtgttgtgtcattgggttaaattctggtcacatgatctgtggaagtctcattccagtttttgtttgtttgtttgtttctttgttcgagacagagtctcgctctgtcacccaggctggagtgcagtggtgagatctcgagatctcaactcactgcaacctctgtctgccaggttcaaacgattctcctgccttagcctccagtgtagctgagattacaggcatgcaccaccacaccaggctaatgtttttttgtatttttagtagagacagggttttgccatattggccaggctgatgttgaacccctgacctcaagtgatcagcctgccttgacctcccaaaatgctgggattacaggcatgagccaccatgccaggccccatcccagttttctatggaatggaaagctccaagcatgtgccttgtctctagtcagatttttcatcaggcactaaggatgactaagaacaaagggacccacatttcagaggagaggcaagttaagaaccttaggctgtgtggtttcttttgtaactgttactatcggctctgtgttacactcctcctccatactcatctcactcaaatgaaagtatttaatttggtttttgatctccaatttttatttattagctaatcccacgtagttacaacataaggatagaaaacaaagaaaatcaaaatctagcttagcccaaaggcccagttcttatggaaaataatattttgaaaagcatagattaaatgctgaaataaatgatcagaaaatattagtttcatttagcctgtgtaaatattgagtctatgtggaccctgagtaatcttacagaagtcatttaggaagttatatactaaaacaatttatttttctttaacaaaagagcatttttgtatttgtgatgaatttgcattgctctcaaaaccacttgagggttacttcatctgcaagtggcctttgaaaataccttcattgtcctatataaatctgctcacccagcaactgacagtgatttcacccttctgcagaggagtgtgtttttgaggtaattgtagattgtagggaataaaaacaaagacctgagaaacttcctagcagtggggaaggattaatcagaagatcgtgaggatgtatagttggggaggttgccacccacatggtgtgccttgcaagtatcagctggggctccccaccaccttcctacactacattacatcattgtactcatttctggttttgagttaaatcattgaaggcagttgttaaaatttagttatgtgaaaagaacaagacagttttcactagtctaaatcaactcattccatcagttggccagtgatagaagagggtatcgcatggataagttcttttgtttttctttcttcttttttttttccttcttctttgtttttttccttcttcttctttttctgagacacagtctcgctctgtcacccaggctggagtgcaatggcacgatcttggctcactgtaacctccgcctcccgggtttaagcaattctctgcctcagcctcctggtagctgggattacaggcgcccgccaccatgcgtggcgaattttttttgtatttttagtagagacggggtttcatcatcttggccaggctagtcttgaactcctaacttcgtgatccacccacctcggcctcctaaagtgatggatgagttctaacgggcaggagggtcaggaaatatctggagaaatggatacttatagagagggaggagctactcactgcagaaaaccaaagagggaaattaaatgagcagcaaatgtcactcacctcaccacaattcatataaccagcttgataactagctcctttgaaggtgagcaaaatccatgtgatatcacaagcaccttctaagtgttcactaatacttcaatatggaatgccctaaaggtagcatccccactgtttacagtacaagtggaggacctaagagcttgttcaaagggcagactcctgggtggaatgggaagggaccccagcaaccagtattttttttctttttttgagatggcatgtcactctgtggccatgctggagtgcaatggcgcaatcttggctcactgcaacctccaactccccggttcagtcaattctcctgcctcaccctcccaagtagctgggattacaggcacacaccaccacgcccagctagttttttgtatttttagtagagatggggtttcaccatgttggccaggatggtctcaatctcctgacctcatgatccacccgcctcagcctcccaaagtgctgggattacaggcgtgagccaccgcgcctggcctagcaacctgtacttttaacaagcagcctggatagtccacaacccacttttttttggaaatactgcctcagagggtgagacattgctgctatgctacttaagccttattttcaagcggtgattttctgaatcagtggttctcagctttgtgcattagaatcacctggggaaatttcacaacattctgggtgctgatacccagtccccattcccctgtagttctgattctgggatgggttctggaatccctgcgattcaaaaggttcccaggtgattctcatgtgcagccagagttgagaatcactagcctaaactgtcataaacagcccaaataagtgaagccagctccccacaaatgcctaatttacatgatgatcattgataatagcctattgacgttggtctatcctggctttcctaaagaagggtcctattgttttgatgtgaaactagaaaggagaacagaatatattatctacaaagtccatgtctcagctactcatataatttattttaatcttcctcatggattttatttggattttgttattgttgttttattttcttttgtttcttacttgggaggtccggtctttggtggtaagagtaaagttcaccatcatttaaaacaggggatttttctagtttgagtcatttcagcatagcttccagaattctgggattctgaaggataacactctggaggattagctttaataaagccagtgagatctaaaatatgaatcaaaaaattaggaatattactttttcttgttttccacaagaatgggttggtggctttacagagtgcactgcagggtcccattagaaagcaaacattctctgtgaatttcaaatgcaacttagtttaccaaaatctaattctcaaacaaccctgtgaatgtatgttccatgcataaatgcgatgcatctgtactaaataaaattcttccattgcacagacctcttccttaaacagagatcacagtcttgcttgtgctacagaatatttacaaatccaagaagatttttttaaagacaataatcatttctatcttcaaccctttcaaaattgggctattctaatacatgcagtgtgaacctccaaattctatgtggagcagttcttaactgtttagcagcaaattaagacaatatttttcccacaggctttgagagggacctgggtgtgagtctactctgttaagacattttggtttttacctttggggagtgagctgaggctaatgaatagctctcagtaattgtgcattcatattcatactcttgcttaaggcaaagactcaccacggatttgatagggcccgccaccaccccccctttcactgattcatgctgtcagtgacttaattagttttcctgaaactatctcactttgacagatttttgcggtaagcacccacgcacactcagggtctctgaagcattctggtgcctcatgactgggtgactgagaagcagtaggtcagtcttagaggaaactctgtgactcatggcatggggtctgaacttagggctagtgctgcaggagcccatgcagaatggcagtctgctgctttctaacagaccaacactgcccccaaacaagaggatggaaagaagggctgtggaggagacacagaaggggatcctcactgttgctgccagtggcagctgcctgaagactgccagaggtactgtggaggccttccctgcaccagcccccaccataggctaccaaatcgttggcgatgagttagaagtgggagggagaaaggccaacatcttctactccttctctcactacttctggatatttgagcacattaacctctttgggcctttcctcataatataaattaggcctgctatgatggaatatcatagactgggtggctttaaataacaaatatttatttcccacaattctagaggcgggaaagtacaaggtcaaggcacctgcagattcagtgtctggtgagggccaccttctggcttacagataatggtcttctccttatatccacatataccaggtagaagaacactagtccccttcatgagggctccaccctatgcaacctaataacctcccaaaggcctccataccatcatattcaagattagccttcaacatatgtatttgaaggggacaaaaacagtcagttcatagcactcatctataaaaggaagcaccctccagctctgtattctatgggcagagtagtggtaagctacaggtatataatttttagaaagtctaatcaaactttatcttctcttgattggtttttgtaatctacagtttgtaaaaccctacaaaataaattctcacccaaagcaacagaattttctaatggtatttagctttaagttgtgttgatgcaagtgaatgtatgaaatcagcttcagataataaatggatatatggttattcatcaccaagatggacacatggaaatataattagttgtgtctctcattgaaacctaacatatttattcactaatatattttttaaagtatagctatattataacatatgaatgtaaataaataataaacttatttagttagctacaaataagtctcatttatgttcctgagaaaacccacactatcaaaaagttgtcatgactatttcactacaagtaacagaaagccaatgtaaactaagttaaacagaagggaattgtttctgctctcgcatctgggaagggcattgaaggaatcccttgaaaccaaagaaaagatatgaacaccaggtcctggaaacctgggatgcaggactcggatgatgtaggattcattcattctgtccctccttgccccatctcagcttgtctctgtttggcttcattctgcacactttcaccaggcatctgaggaaatcactcccagattcaagccctttctgtgcatcagttttcttgtctttaaaatgtgaatagatatagcattggactcataggcttgctctgaggttaaatgagttaatatgtgaatgtgcttggaacagcacctcatacatagaaaccacttcgcccatataacaataatgattattattattacccatccaccttagagtggaaagaggactataagtcaaccaatacaggactctgactgatccttttgcactacctgccttcctgtgaaccaagagaacagaggactatgattgagcaggtgtggtcgcagggcccacctcctacaggcagggctgcatgaggtatgcgggaaatgcttccagccagaagcaagaactgccctagcacgctacacacaccaaccacgggaacaagtactccacacctgtgagatattgacaatccttgtgctctttcacattggatgctcacacccttcctgttttccaaatgaagaagctgagttaagatcacatagcttgtgcaagaaagatacttaatttctgataacttcacctttctcatttaaaaaaatgggtgtgttatgagaactaagaaatctgtgtgtctagtaggatgcctgctacttagtaggtccatgcccccatccgatccccccaggatctcactagttaaaagaaggagaaactttcattcaagactgtaaaaaagccaggttaagacatttcttttgtctatatcaacaagtcattgataaaatgttagagtgtaaaaatctcaatcaggagtacagttgcctctaaaggtgtgatactccttccgctaggaagttcaaccctcctcatccttgccatttctcttctcagaaaaagagtaatttacccacatacccatgactaaaattccaaactctgatagtctgactctacttttatgcaattagctacttgctttgtattgcctgttttctattgctgtcacccttaccccatctcttttctatatcacatttagagaaaacatattgaacacattttctgtttagttttggacttgcatttaattaggtattaatctcactaatgtatttccgaccagcatggaggtttttgtctggttaatttctcccacaagaactaagctccccacacccaccccaactcccacagctcaaggttttaaatgatttattgatattgtctgactcaggcagtgtatttattctaaaactttagggcctgagtgcacaggttagactgaaggccactgggacatttccatgtatagaaaactaaagttcgccactaggcccagggcctgatcattttttgcatcgagccttttgttcccacgggagatcatttccacctgtcagtgtgagcacattcaggagcatgctctaattctttttgttcttgttccatctctcatggcaacccttaggactttattctgaagcttctgttgttggcaatcttcatggcgcctttgggacaagttatccatgtgaagatgggttggttctcaccctcttgcagatgcaactcagatttatatttcacttaaggtgatgttgatcttcctgtctctgtgttggaagtttgtttgctgaaaataaaatgttaaacacaacagatgctcttcaactgaatgtagataatatgccattccagcctgccctcatggctcttcagatggccatgaaaacaaaggctcccaaagtcacctaaaacttaggtcctgtaaaaacatctaggaaagggtaagatgtgttttacttattttcctccatcctgtaaattgagtatttaataaactgtccttattaagcacctacaatgttcaaagtgtatacctagttactaggattgaggcaggaggctaaaatccatgcactctccccttcagggacttaaattatagttgataagtcaaataaagatgcccatgaataatgtatccataaaaatatggctaggaacgttgatgtttgcaggatctgagtgatggcaaaacagacccagggaggaagaagcagcttctttatcttcagggacagcacgatttccacaccaaactctaaaggccactcttattctactctctggccagatggttttgtgcaggacaggtggcaccttgatattaaagaggtacttgactaaaatcattccacagagacatgaaggggcaccatttctctgttccttcagtcttacaaaaagaaatccctttctaaatctccatccttatgtttagaagcctctcttagcccacctactgttattggtacccatgtaatggttcaaaatattctccactgtatcaatcgggatctcagcaggaaacatatggcacattcaaagggtatttgaagaaaatttaatgaagaggctatttatggaggtgtgggtagaattaagagaatcaataagggatgttgaagtacccagggagtaggaagagccagaagctgttaccttctaggcctgcagggacaatggaagaaagtgggtcattgagaggaaattcagccttgtcaacatgcagtgccaaagagaggagcaggagaaacaaagaacctgaactctctcttccctttgatcaaaacctaatggaaaggagccagaggagaaaagattccaggtgaggcagtctgatgaagtcagcattccagagtacagaccaagccagagaagggcagaggatggatctggggaaaaaccagctcgtcccccacactcagattgatgctgcttctcaaccagtatataataatgccttcaccagtagaatcctttctgggctagaggatcacctggccagctttggcttgtcaatctatgattattgataaaccactaagtaaatctgaagacttaaggaggattgtacttaagtacttgaaccaacagcttattacctttaaattgtaaataaacatctcaggatatatgaagcaatctaatctgcaggtggaaacaaaaatgttaacacattcaaataagtcagatgccttaaatggtaatttgtaagaacatagttgagacttcttcttgttaattgatttatctgttgatggagctgatcattactaatatgcctataagcatctagaaaactgtacggttctctctttgattcctataggcatatttctaatggaaaccagtaataaaattcttttctctaaagaatccattgaattgctctaattttttcttttgttcatgtttgaggactttttgagaaattttaactaattataaaacaaagtagagaagccatccaattaacaaatttcattgtagagcaatatttttgaaaagccaggcttttatttactctaaccctcaaagctctacagtacagaagtacctggaagaaagatacacagggaggtgtgggctaaattccaaatgctgtggggagttttccaatcttattaatgtgtaacaactaactggaatccaggagtgagttgcacaattgctatctagccccactagatcccccaaactgttaagtcattctctcctgtcttttcacacaaataatgtgatagtaatcactattatttatttagggtttgctgtgtgctaagggctgtgttaagaactgcatgtatattaactaatttaatctcaaacaaccatttgaaataggtgttattactgacactattttacaggtgagaaacatgaagcattgaaaaattagataccatgcccaaggatatagagttgataagttgaaggactcaaattcgaaccttaagattcagtttcaaagactggtttcttaaattctaccccaacagttacctccaaattgcatttgtatgcagctttgggactttcaaaaatcaatgaaatatttataaatgtattcatcccctaccccattcctcagaaatttctagaaacaatattgcatgtaaatcttaaaatagtcctgtgggatagatgttgttatttcttagcatagtcaagaacctgaatgatttagcaagttacctagtcaaaaagcaacagagtcagaactcaagtcctgactttctgaccccaagttcaaggtggctctgctgaactgcagcttcttcaagtcacctctatcaggagcacaaattcctgaccctgtgaagacagaccgattagggttgcagtctaggctacatgaattaccaattctggatcctcagctattaatttaaactcactaaacctcagttttcttatctgtaaaattgagattaaaaaaacaaacaacaacaaaaaaaacttaccccaggaaagttgctgtgaactttaaataagttgactttaaggctagggtattgtcacttacaaaaaaaagtaaaatttaatatataaatacatagaaggtgttcagtatccagcattcctgcaaaatgaaaatcaaataaagtcactctcctactgcaaaccctacttcccccattccataagatgcaaactcctctctagttccatgaggactttcgtggtctcatttttgtccaattctgtcctcatcccattgctttccggcccttactcactaaggtcagccacactggccttcttgaggatctagccttaaggcctttgcacatgcttttcttttccatagaatgctcttccctcagatcttcatctggtactttctgccaattgtttcccagcttgatggtcatctgttgagagaacctcctggataagccaaccattttctgctctatcaccttatgtatatcaccctacaatctcatcatttcctttctagcatatatcctaacctgtttattttatttgtgtttttattgattgcctctcctcaccaggatgttaatgccagccttgttcactgttgtatccccagctcatagaacagcatctggcatatagaaatggctcagtcaatatgtgttgaattcatggatgataaatggtcttacctaatttactatccttcacggagatgttaatcacaattggtgattgtgatcttagcttcttctagcaacttattgtggataaagtatatattttaatgctatatccattagggtatagttattattgcagagaacataatggaatttcaatgcatttacacatgtttgaacaggatgaaatatatgagtagtacttgcttctgtgtaatatgcaatattgctgaaagcatgataagtggcacgagagatggatgtcacgttgtttgtgatagtttcccctgtctcacttttaggctaccctccacagaaaaagccagtccacgcagggctctatgaaaagcccaggacagcaacccacccatgtggaaggtgtgtacaggccttcttttaatggccttatgtaggaagatgtaaagagtttgggcttttatgtcacatatctgtattggaaagccagccttaccacttaccaagttgcataaatttctgtgttcctcagttttctcatgtgtaaagtggggataataataccaaccatataggattgtcgagaggaaaaatgcaaaattagtacatagaatacacttacaaaagtgtaagtgctcaataaaccccaaaactacttttacatatcctccatgagagtcggatgggggtgggttcctgtttcctcttagggagagcagatataagaaaaaaaaaaaagtatgtgataactccaaattttgattatttagttttattgttaaaagtgaatcagggttgggaggccaaggcgggcggatcacgaggtcaggagatcgagaccatcctggctaagatggtgaaacaccgtctctactaaaaatacaaaaaaattagccgggcggggtggcgtgcgcctgtagtcccaggctactcgggaggctgaggcaggagaatagtgtgaacctgggaggcggagcttgcagtcagccgagatcacgccactgcactccagcctgggcaacagagagagagagactctgtctcaaaaaaaaaaaaaaaaaaaatcagggcaaatttcagtatttcacagtgttaggtcagtttttccttcttcaggtattagaggagaaccatattcacaagtattaaatggctccaaagagcaaggcggtatgagaagcagtagcgacaagacacccaattctagcatgggaaatgtcttgttatttttccagtagcttcacgtctctgaacttcaaaagtgctcatggaaagcaagacaatgtcctgctgtaccctcttcccctgggtcccagaattcaattaaaatcacgttctatcttgcctaatccaaagtgttttagatgaagggaacctggaaaacgggactatatctgtaaaagtgtgactgtattgtatccagcaaggttctatgcagatagagatgctggaaaacatccatttgatggtgaaagaaaatcagatagatagacagttaaataaatagctcctagagcttttcagcacattattccttcataactggagcctgcagggctactcatgaaataaaacaatcttgtaatcatgtaatttcaaattcattgcattgtcttttttgccaacattctttaaccgcgattccagcaaagaagatttcagcatattgctattcaaacatattcaaaacctatgacaagctaccctttaagaaggcattagcgtgagtgccatgggaaaatgtactccaaggttgtagatgaattgatatgatctccttgattgtatctttttatttatgaggcataatttctgagcactggaaagcaaactgcaatgagtgatgactaacaacaaccaaagtcataaatcagcagcagtgaaagaagtagtgattttgatcgaatctattgaattagctgttggccttagccaatacaggtattggaaagacctttttaatatctatttgtccccctcatgggaatgtgataacaatctcattacatgcccctaggaaacaaataatttaattgtttgcccgttaacatacaacctgtttacttattaattactggcatagctgttcatgctagattttttgtttatttctgatgtgaattgttacaaaattatgttcacattccttagtttttataaacaattatgtctccttagagcttcttgatataaatttgtcctcagaattgttgaaatgctttttttaatcaaatattgtcattatcccacaaggaagtatgttacagagtttcacagaagttgcagagagctcagatattcttccctctcttaatctctgacagttaacacttttactaatacaactcttgtaataagcagcctggataaagaacaaaaatctcaaattgctccaagcgtaaagacagtcatcatcacttacattaggagttaacagattagagatcttttgtaaaagattaatcggctgaatttggttactcctgtattacaattttatgaggagaataatagcaaatgtaagaccaaatagacatcagcttggtgctgacccatatacaaaccatccataaaccatatattatgaagtatgttcccttgatttgaacaagacttgtagcattgccttggccaaaagaatcataaaatattttcacaatttaggggtttttcttatgataccataaaggaaaaatgcatcaggaacccccttgaaatgtacattaataacttagctttgctgtaagacaatacttggaaaacatcagtcctaaggaaggttatttcagaaagatatgagacattgagcgaggcaaagcattaaggtgaaaactactttgtttagccaatacaggcattagaaagacctttttaatatctatttgtcccccttatgggaatgtgataacaatcttaacaagttaagtgtggaaattgtgctaaaaaataactagcacaggccgggcgcggtggcttacgcctataatcccagcactttgtgaggcggaggtgggcagatcactaggtcaggagtttgagaccagcctggacaacatggtgaaaccccatctctactaaactacaaaaaattagccaggtgtggtggcaggcacctgtagtcccagctactcaggaggctaaggcaggggaatcacttgaacccaggaggtggagatcgcagtgagtcgagatcgcgccactccattccagcgttggtgaaagagcgagactctgtctcaaagaaaaaaaaaaaaaaaaaaaaaaaagaataactagcacagtaacagaagcatccaaagggtcaccattcttggagatttctgatacatttccccttctcccatcctgtgcagactgatggtcccttctctttcccattcacaaaaattattacaatgcttctgttcacaaatgtttgcttttctcctagaataaaattaggaggagaaatgttgggttgagagaaattgggagcatttagaataatgttactctgcactgagagaaaaatagactcagcaatttctagaaatatcaaggtttcaagaaattactccttaagtgaaaattaggaggcaagaagtggttctacaaagtcagtaaactctagttctgtttggaactgtgaaaaaacacagtaattaactctatgatgattattgaattgtgacatattccaagatacatttattgtgtttatttgaatgactaaagttaatgtgaagtataactctaaagagacataacaaatagaaattgaaaatgtacagtgcctatattctgtacctggctctataaagaataggcctttgtatttttcaaataatattgggtgtaaaaagcgcttggaaatatgttgaaagggcagagtccaaggtcttctcaccagaaattctgatacaggtacccaaaatcattttgatgaccatggctaaggaatatattgtgacaaagacttctcttaaaagaagatttctaagaggcaattttcaagagagaacaaatgattaaattcattgttttcacagcaatgtgattatggcagcttagtggcagatgttgacactccatgtaattaaaaatttttaaggcaaaatacaataattagtcctttggggtaggaaagagtaaataaaagaacaatttcatttttttaatgaacaacaagcataaatatggtaatagtctctagttagatttaaaaatatattacattgaaaacagaaattccattgaaaactgacatattaatctatcattttgctagttaattacagaatttgtggctaaacaattttagtttttatgcttattaaaagtagttaatctatgttttctatgacattttacattgtaactttcttcatggttacaacagaaaccttagagaaataaatcaacaagtcagtcagtcctaacttttcattattaacgactagggaagtttctgactctacaatcataactgtgtgtgcacccactcattcacatgtgaaagtgttcaccaaacccaaataataatgtatttcagcagcaactttaatcatctttaatcttttattataaaagaataaatatgttcagtctatgagaacacatggacacagggaggggaacatcagacacagggaggggaacatcacacaccagggcctgtaagagggtggaggctgggggagggatagcattaggagacatacctaatgtaaatgatgagttcatgggtgcagcaaaccaacatggcacatgtatacctatgtaacaaacctgcacgttgttcacgtgtacactagaacttaaagtacaataataaaaaaatatatatatgttcagtctaaacactgtaggaacaaaaatatcctgaataaatcaaagatgaagaacatcttggcttttttttctcttggccatagaatttataagccttacttgcttttcttccccaataataactcttccatttttctaggagaagcccacacactaaagaaagagaaaatacacaactgtttgttcacaagatattttatttattgatttttatatgggttcattgcaactaaaagatcgggacatattgctaaaaagttttctatgtgggatctctgctgcttctttctctaccctataaagacagaatcgaatcttggggcattgtttctcagtgggaatcataagcataacctgttagtatttttaccctgaaccctgaactacacttcaatacttttatctcttgcttagccgggcatagacaaaaatccacagtgatattttagacaaagaacgtttttacctcagcagagacagagacaaagacagagagacagaaggagacagaaaaaatattattcacaggttcttttttccttttctcctagtggtttgatataacagagacactgcctcatcatacaagttttgtgaaattcataatgcttcattatctcagtcagctttctcttcattctgttttcattttcacagtagctcatgtaaataggttgatcctgctttgcataagcatgttgatttatatgaatgctattttgatctcaaattgattgaatactaaaaagaaagtctaggaaaaagagtaatgtattatgaaggactcctgccaaagacaaaatagcctgcatacattccctattagtgatggggaattttgaattgcctggttttcaaagagaatatttccaaggaaatatagcaaaacactataatactgaggcccaagtgtttttaaaatccagggattaaatcacattttggaactagaactccacctagtagaagttcacgtaacacaggaaggctgagatttagtacaatctacgacactaccattaaaaagccttaatagtatttatgattctatatctacattgaaaatgaaagaaaagttaatgttcataagccagagccagaactgtgctgagcacttgctatgaattatgcttatttcatctcattttctttcaacaccctatgcctgcactacttccatctcctattggtgcacagtaattaattggcaagttgttgaatttttcttttattatacctagttgcactttcttcctcattttcctccccatccattgtagcctgaatttaaattctgcctgcgctcaaatcaccaaccaaagttctgctcttggcaaaaaacgtcatatcaatatttgcaccttactttgcattcctttgtcaagaatattgttttaaatcttgtcattcattgtgtaataataggtgtcccccccaccacttcccagaaagatatttgcagtaaaagaggttgttctggggcacagtgaggagacaggaaccctcctcatcagccctgaagtctgacttcttcatgaataacctccacctcccctccctagtgtaagtctgacctcacctatttctgaggggactctgagagcagctgcagttgtattctgatggatggactctaacttccatgaaatctggctctcccattgctagctccttacttccctgtgcttaccaaaacaaacctccctcacctaagacaacttgtacatgtctatccatccttgcaagctaagacaccttaacctaatctagaattgcaggtattcgtctatggacaagtcgtttaattttcatgattctgactattttatttatgcatatggatggcatacagaatcaaaaaccctgctcattgaaacaggcactggagagcagaattcttgtttcagcacttgtaacttttgtcaccttgaacaagatagtgaaattttctgaggctcaatttcctcacctttaaaaggggactagtaatacattctcggctcaccttacaaggtttccattggaaggactaaataagctgacataagttaaagtgctttgtgaaatgtagagtttatacaaatgtgagtgattattatgcaaatgatgagaggatgtatccgagctctaaaaagagcaggtgtatctatgtaagtaggttagttgtctcttttaaaaaatgaggctcctggcaatcctatcagcaaggggctggagatttgcatttgacagcaacctgaaaacaattcaacatcagaaaatttactttcacaaaggaatccggaaaaaaagaaaagtatgaaaaccactgataggagttgacctaactactaaaaatctgtctaatgtttcttctcttgaagatattattgatgcaaaagcaaagtaaacaaaaatgaaactaaactctcactgcaaaatattctcataggttttttctttttttcccccacaaatatctcctattttgaacattctgcatgctttttttttttttcaatactgcatgcctggaatgtgtgtactgtagaatcaaacaagtttttcagatttgtctttaaaagctcgggggcaaatttttagaaaatatataatgtagaagaaacacaatgagaaaaaaatttcctgaagttaggctttcacatgaaagcttactaaggaatactactactcctaaacacgcagacagtcttcttgtattgccatttagatctatcattctgattgatcactgtgtagttggctattattgggcctaatttaaccctatacactcacacatccatctactctgtctattgtacctgacattctacaaattacttactcatgcaaatgacgacctaaggcaaccttttaggatattcgtgtttaattatacaaatggttcttgataaataagattatacatcgttccatatgtttattccctccttgatgaaaggaaatttaattttcatgcagatttggtggggacaatgtttaagaattgctgagttttttgtagtctgcagatccatccagtctgcagaagctgacaaaatcactccacttcccacacagagatgagcagttttttcattaggcttaaatcaacgtgctgcattctgaaatcctaaacggccccctttgtgttcacatggtcaaaggcaaaaggcaaaaaataaaaataaaaaaggaacagcctgctctccttgctctcctgtgtgattacaaggttgcaagatcaaagtttatctcttcctgttgtgtttagttgcttttggttgccaatttcgttttttttcctttcttttttttttttttttcccagccttagggtatcttgcttttgacagtcttgttgatttctctttggaggtctgggcagtgaattctgcaggaaaagcccccagtagctggacatggtgcagaaccgggccagccccaccagaaggtctcagagcccccacgttccatgtgatctcttctacccaagcagtggtcaacatcagtgcccctgggaagcccaacgggatcgtcagtctctacaggctgttctccagcagcgcccatggggctgagacagtggtgagcagcagagctaaaaatccaggactggttgacttttaaaaatcattactatgaaacctttgtttttatgtttttgtttttccctccatctttcttatccttctgttctcagttgctctacggtgaacttagtagcacaaatatccctcagagaagaaaaagtgaaccctgaggaaacatacagaaagtatgtaaactcttagggagagggatgctaaaggtggtattaaagactccacaaacgtaagaaactaagactttaaaggcaatcacactaatttaatttaatttaatttaattagaaaacagatcaaccacttagagtggtggcacatagtaagaagttggcaaatggtaattattggtggtgtaaatgttagtatgaaaacaaaatagagcaaagaatatccttggaatctctattttgacatgcacaaatctctaataatacatggaaaactctcattcctctggtgatttcaagaaagttctaaccctttagaagagagagcagagcagctccatcagcatagccctagctccactgtttgttcgttaacacgtttgaggcacactgggagacaggagagattgctcagggaaatcatctttcacattgtgcgttagccaagccacttcccggaagcgatgctaagaatcaactagaccagttcctgcattatttaaatgaagataccagcagccagcacgatgaagactcttgtctctgtggtatagcttgtgtcactctcaagtttctcatgaataagtggagattataatactttgttcacacaaacattgtatagagattgtgcagatcctggtattacactatgcattatttaggccaatttagggaacaatttgggcaagtgtggagaattcctctgagaccagagtgtcaggtattgaaacacaatttcaacagataacttacatacagggaggcttggattgaatgttaaaggaatattagcatattttctatagggcttcgtactcaataaatatagatgatgtaaatacaatcaacccttgattatccatgcttataaaatgataataaactaaaataatttatatttggagggcattgtatgcattttttaacagctcttcttaatcatatgttctttatgtcaacatgaacattaatttcagtttctgaactcttgttccgaagagtacttattaaaaccacaatgaggttaaaaatttgctcaaaataaaccaaaactttataatcctacaaagatgattgagagaagactatgatattttgtaaaaaccaacaccctcagaggaagagatagactttcaagccctccaatacttatacctgattttaatgtagatctgaaaagattttttgactgagaaattgcatgcaagtaaccatggcagaatatggaccttggtgaatgctgactagacatataattggaaggcagattttgttttttgaaaagacatcactctgagggtcatagactttgatcaacactttgtgtgttccgtgccattttctaatacctttctaaggtaatagataatcgataatattatgccttgtgatttccatcctgctacctcaaacgtctatttaacggttacattatcagatttttcacctatttgtcatacctctctaactgagttggtaattttttgaggataaatgtcatgctaaatgccatgttgtgtctcccagagtgcctggcatggtactccatttgtaggaggtgggatcttggataacattcatcaaacacctttaatgtttgacactgcctttatctagccttccttccttccacagctatccgaaggcatggccacccagcagactctccatggccttcaagccttcactaactactctattggagtagaggcctgcacctgcttcaactgttgcagcaaaggaccgacagctgaactgagaacccatcctgccccaccctcaggactgtcctctccacaaatcgggacgctggcctcaaggacggcctccttccggtggagtccccccatgttccccaatggtgtcattcacaggtaatgggtcaggcagaaggatgaagaaactaacaaggcatgtgtacagacatatgaactcatggtatagcctactctgcacctaggctacaaacctgtatagctacctggcactccccagggaggacttgcttattgaacagatatctatagcaaagtagacaaacaaattgatttgagtggtaatgttacctgcgatgtatttaaatcataaaagcaactaatgatagaaaggagaacaacgaaatgttttacattaaaaagacaatgcaatgtgttcgtattcaatatgctcttcctaatggttatctggaagcattccttctaccagccttcactggaacataagatacctccacagttaaatcagaattgccctgatctaatttaaaatattgtcataaaccactgtttgaaaggaaaaagaagacacttgactcaaaatcatttagaaaaaaaattatttactctaaaaagagaagaaccatttatgtctctcctcttaaaagagggaaatgtcttatctctaccaaaaaggatcactagttgctgggtaaacagcaatgtgtgtgtagatggtgacttctcttatcatttctctggttacatctgctgctcgtttccaatagcattacataaggtgtttctgagagcagtttcctgcaaatggaaattttaaagagcctgtagctctgtgaaaacaaaatgtctcctcacaaaatagaactggttttaaaagagagagttaaactaattccattacccgtcttgactctacgtatccattctcattttagctatgaactccaattccacgtggcttgccctcctgactcagccctcccctgtactcccagccaaatagaaacaaagtacacggggctggggcagaaagccagccttgggggtctccagccctacaccacatacaagctgagagtggtggcacacaacgaggtgggcagtacggcttccgagtggatcagtttcaccacccaaaaagaatgtgagtataagtggctgctaccataagccagagagattggaatgtggtcaggagaagcttgccctgaaactcggagaagccacttttaaaaacagattgagtgggctcaataacactgaatgttactgaagcattgatgaggatgactactgaggaaaaatgcctactggatttaataatatggaagtcaagggaaaatttaagaaggattttcttgtggggatagggtaaaaataaatttaggggaagttaaacgatcaatgggaagaaagaaaatgaacaaacactggtagaccatttttataagaagttttgctactccttttctttgtaaattacatggcataatctctagtatgtccagagagcattgagacatagcactattaggaaaagcaaaagggcaagtgagtgaaggaaagagcaatcaactaattaattgggggcttccttacatttttatataatacagtcacgcatcgcttaacgatggaaatatgttctgagaaatgcatcgttaggcgagtgtcgtgaaaatatcatagaatgtacttgcacagacctacatgttataacctactctgccccataggcatgtgactgtgctgaatactgcaggcaattgtaacacaatggttatttgtgtatctaaacatagaaaaggcacagaaaaaatctgatataaaagataagagggccaggcacagtggctcacgcctgtaatcccagcactttgggaggccaaggcgggtgaatcacctcaggtcaggagttcgagaccagcctgaccaacatggtgaaaccccatctctactaaaaatacaaaaattagccaggcatggtgacacatacctgtaatcccagctactcaggaggcttaagcaggagaatcactttaacccaggaggcagaggttgtagtgagccgagatcacgccactgtactccagcctgggcaacagagcaagactccttctcaaaaaaaaacaaaaaatgtaagagatggtacagggcagctccattataatcttatggaaccaccatcatttctgcagtcttgctcaaaatgtcattatgagatatatgactataacttagattttataaggtatatgctttcattgtttaataatggcaaacacaaaaagtattaagaataataagtgcttatcagaaccaactgcataatttatggagtccagtggaaaatgaaaatatggaatcctttgctgaaaaatctttaagaattccaagacagtaacagtacagcatcaggctaagtccaagactcttctatgtcacaggcccttgcaacagcacaggtcacatgccaaggaagctggtccagcttattataccccaacccagaggcaaccactactaatattttggcataatcaattcttttaatctcctttctatgggtaatttttactatatggctgaaatactataactaaaatttcatagtcagctttttatacttgacgttattgtatttgcatttcccgtggcattaaaaaaactctttagccaccaattttaatggctatacaatattccatatataaattaattgggacattttgttttttttttaatttcccattaataaatatgatgaaaaaatctttgtgaacagatctttgaatgtctggttatcttcttaaattaaattttgacaaatagaatttgctattaatacatcaagtattttaatattttaaggctttggatactagtttcatgtttgctttcaagaaagattatgtcagattataaatcttacctaaaatactctatctggcattgaatatgatgccaattttaaaagcaagaattacgcattcataaagaccaatgtctcacacaaggagcttaatgtgtctgagcaacaacatggtaggatgttagtaacagatcacatttacagaggacttgtttgttcctggcagtattttagcattttacaaataattcttacaacagacctattattatccaaatttacagatgaaaaaactgaggcagaactataaactgtgtactgcgattccaggatgccattcatatagactatgatctgaactgaggctcttggagttagacagtgacgtggccctaaactaaggccagagcttaagtaacctggccagtttccacatctagtaagtgcagtaattactctgaactcatggtcactgagctcagctgctgtctcagtactactctttccctgatcaattcatttcctactctctgtaatcaagacttcaaaccatctccaccttcgccaaacctccctctgccgctcaccctttctcccttcatgcccacaacccagctcacccatttctccctttattctctgcagaactccttgtcttgtaattttccaggaaaagagatgtcttcagtcagtaatttgctccacttcccactgcagacaaagctacctgcatataccccattgctgtcagtgacaaggaaagggtggtccttcttccgtctgaaataaacctgccttccatgcagtgaacttcatccacttcattactcaccatcccttctctctccttaatctttctgtgtatctcactttgattcaaagttccttctacccttctaatgttaaagcaaacaagctcctcttcccctgcagtgatgtggactctactctctctgacagcaaaactttcctgaggaacggtctgcagatgctttgcccatatcctctcttccacttactctttaacttcctcagcactggatgaaaatccctttctaagtttgcctttggcctccatactgatatatccagaaggcatgtttctccaggagtcaccttcactgactttccagtagcattcaacgcaactgaactttcaatgttcaatccttttttaaaaagtggtttaccctcattttcattaccaccctctcctggtttctcctctacttctttggattttcatttttagtcaactttgttggttgatcttcttccgctgcccaaatcttaatcctaaacattttaactttgtccccttgccgtttctctactccctcctttcctcctccctcatcaggtgagttcatctgctccaaggctttggttccaaaagccaaactccagtggtcacctcctagtcaagtgctctgttttgaagtgtatacccctccacccagattcctcacagacatctccctctgaatttctcataaccagcttacattggacaggccccagacagagcttgcaactttccccttcaagctatgcttcctttagtcctcactttctccattttcatctccagcactgggcacagtatcttagattccaatcaatgttgtttaatgaataagcgagtgcacctaacactgcatgtttattgttgacactgctcaatcagcattttttgtcacccatactatattcaaagcaaactgtaatgattcttaatgtgtgctgtctgattttgtaatctcctttgcactacatccagaagccaattttgctaaatgttgcagttttttggttgatgtggccagaaagccagagaacagctaggtgagctttgtaatttataaccaattcccttttgagtcatgaagcttagcttttgccagaattttttttttcttatgcttggaagaacaaagtgaactgatttaagattttcttcctgtggccaggcacactggctcacacttgtaatcccagcgctttgggaagccaatgggggaggattgcttgaggctaagagttcacgaccagcctgggcaacatatcaagacacctatctctacaaaaattttttttttaaatagccaggtatggtgacatgcgcctgtagtcccagctactcagaagactgaggcaggaggattgcttgagtcctggaagtcaaggctgcagtgagctgtgatcatgtcactgcactccaaccttggcaacagagcaagacttggtctttaagaaaaaaaaaaaaaggattttatctatttgtgtttttttatattggagaagcagcttaaacctggactagcaccataggagaagaggttcccttaatccactactgggtcaatagttacggaaaaatacaagaaatgactatgatacaggttctaaaataccacttatgctacttttaactcattataaatactgggagcacgaaaacatgcaccagagaatacaaaccagaaaataatttggggcctggtgtggtgtctcacgcctgtaatctcagcactttgggaggcagaggtgggcagatcacttgacgtcaggagtttgagacgagcctggccagcatggtgaaaccccatctctactaaaaatccaaaaaaattagctgagtgtggtggcacacacctgtaatctcagctacttgggaggccgagtagtgagaatcacttgaacctgggaggcggaggttgcagtgagccgagatagcgccactgcactctagcctgggcaacagagcaagagtccaactcaaaatagtaaccataataatttaaaaatagaatatgcagttttatatagatgtgatcacatgtacactcagcaacgggtctggagaagaagcctaacaacacatttagttccctctgcttgaatcccccttcagtggagagagaggtgaggtgtaaatgtttaacagctggcctgcttgagggaaaaatggcctgatttgaagtgcttatcagtttccatggtgtgaatacccccattactgctctcaagtgaccaacatgacagcactgaacagagttaggaagggatgggttgtagcgtatcattatataatatttccaccagccagatagagtggatgtaaatgacctcgagcacacagacggtagtaaaatgtagtgaaacaaataaaaagttatgaatttggagtatttataagctttgttttaatataatttatttaagtttatataatttaatttttagtagtggccggatttaacaatgactcacaaaattcctgaatatttaacagttggggtgagccaacttcagcacaccactggagagcacccatagggtgaattggtaaattctgttcttttcaacaaatgtgtaccgatgataacaaagtagcatgggccttatttaagcaagcctaggttcagctccttggtctcctaccagccactgacatagagcaagatatttgacctctctgaacctgagttttctcaccccaaaaattaggaatcaatctttacaggattattttgaggattaaatgagataaagtatgtcaaaagctaggagcgtagtggtacttacagctttttcagtcttccttggggaggatttgtaaactcattattctcgattattttaattgcttactctttttcctcaggaaggtctccaaaccctacaggacaaataagactcctatctttctattttcttgctagttacaagctgtttctttatctgtgctgttatgatatagggaaaaagtgaaaatctactgaactaaggtgatggagagaagtcatagacaaataacaatagagtattccttgtgatatcaggcagaatcaatgttggaaaagcattgagatttaaagagggcttgataactcttgttttggtgtttgcagaaaatttttcttatggctttatgaaaatatcttattttgaaagataacaatcaactgtgtctttacggttgaatattacaattacaaaagcataattattccttattttgttatatttcctaacatcagaaatagatggattgatttttaaagaaaaagaatcagattcaatttagtctcactactcactcctttcttttcttaaaagccaatttggtatataggtgaatcttaatgtttttacaaatatattgattattttgtagaaaataagatctcatgaaataaatctcttctgacttgacaagatgacatggtatcccttcatttgtttccacaaaaattattcatttaaaaggtgagccccagttaaggattttctttttgttttagtaaggaactgaaaaatcaagagaatgtgcctgtgaaatgcacacaaagttgcttctatatgtgatataatacttaggacacctgagcttgattatatactaatgtactatgctattgattgattagtcagggccatgaattattatacttgaattactgtttgcaaggctttttaactatcttagaaaacaaactaacagtttgagaaaaagctttaacaataaatgggtgccaaaaggacgtaattcaccatctaagcagtttggtttggagaaaaaaatatattaacttcatctagtccttggggctttgtggcaataaatattgatttgatatgaaaaatagctatctactgtacttaatagtattaaggatactttacctgttaaaaagagggaaaatgcaacaaaatatgagctccagggttatgctggtgagcagatccattgtatgttaatagttttatttataaaacaccactctctatcgattttttttaaagcaggcataaagttgctgagaaagcatttcacacatgttcccattggttttcttttcacccctgatactggttgtttcgtaatactgaggaaaaagtgaaggattctagcaatgttggttttcttttttttttttttttttgtttggattggttcggtttgattttgctcatattttttttttttaaagtgcacacctgcactccttcaaagaggttaccctttttagaacatacaactttctccccacagtgcctcagtaccgagccccattttcggtggacagcaatttgtctgtggtgtgtgtgaactggagtgacaccttcctcctgaacggccaactgaaggagtacgtgttaaccgacggagggcgacgcgtgtacagcggcttggacaccaccctctacataccgagaacggcggacaaaagttagtttctgactcctgtttctcagtgtggaaggcgctctgttccccagctttacgggatgctaaatctgaaagctgaccagcagatgctcaccattaaaatgtcttggtttaagtgcccccttcttgtgaaaaagttactgctcaggataaataaggttttctttccttcccatttgcagcttgacagcactgcagttataatgcagttcaaggggacagcgctgcctccacaggactggagggtccccaggaagggataagacccaagggccagttgggttcacaaaagaaatagcacccatacatagtcaatgactaccctaaaataatacacttctagcaacttcatagattttcttgctgtatctccagtctccaaacagagccctatcaggaaataactatctccaactcatgaggacctgaataaggggtttccttaaccttccttgatatcagcccctgaaagaacaatcttgaccctctaaaatggagttccttcttcctgtttacttacatgtcccttttctccttgccttgtttttaaattgaaatgagaaaatgctttacaaggtgctaagtattttatagtgatcagcatgctcacaggaccaatgttcactatataatgaattgattaatgagtattttattttggctgtaaggtagaggtaaacagtgagctccagcattgcatgtatagtaatagaaacttaataacatttttacaaagattcagctacacatgttcattgttacagttcatggtcacctgggcagctctttgggaaaggaaggtggcctgatggttgggagacacaggttctacctggccaggcctataaccatctgtgtgaccttgcaagggtcacttccctcaggttcctggccattggaagagcaatttagaccatgtgatttctaggatcccttttgagctctcctgttcagtaagaaactctaggtcatttagtggaaagtacacctgtaaattttaaaggaaggatttaaaccgtgtgcagaacaagatgcgctttgtgtattaccctttactcgtctgatgttcttttcctttgctgtataagctctaattttccttagctctattacttatggataggctattattacactaatgatagctttttttcttaaacattttaaaattagaagtaattttgaatattatataaaacgtcataacttgctttggaatcctatttttcatgctatgatgcattgctcttttaaaagcatgtgccctatttgtaggtgttgaatgaacaagtcatttaccagttcttccttttgtctagccttctttttccaggtcatctgcacgactgacgaaggaagtgttaagacgccgttgatccaatatgatacctctactggacttggtaaacaactcatattatacttggcgtagcacctattcatcttcctcaagaaacacacatatgtttgtttatacatacttggagtcctaatatattagcatagactatacagaagaaattgtgccaagtgttgtcagagtttttttttttgttttttttttgttgttgtttttttttgagacggagtcttgctctgtcactcaggctggagtgcagtggtgcaatcttggctcactgaaacctccacctcctgggttcaagcgattctcctgcctcagcctcccgagtagctgggattacaggcacgggccaccacacctggctaactttttgtatttttagtagagacatggtttcaccttgttagccaggctggtctggatctcctgacctcgtgatctgcctgccttggcctcccaaagtgctaggattacaggcatgagccactgtgcccagccagaaattttttaaaaagtcctcatggaacttatatcaggcaaggagttacaatacactctttttttttttttttttttgagacagagtcttactctgttgcccaggctggagtgcagtggtgcaatctcagctcactgcagcctctagctccaggttcaagcgattctcctgcctcagcctcctgagtagctgggactacaagtgtatgtcaccacgcctggctgattcttgtatttacagtagagatggggtttcactttgttggccagggaggtctcgaactcctgaccacaggtgatccacccaccttggcctcccaaagtgttggaattacaggcgtgagccactgcacctggccagaatgtactcttaaaatgccaaatattgaattgtaaatatggaaaagaccagagagctcaaactaaatttttctcctaaccacaaaccctgtcaataaagaattgtatgacttcgcgtgcataaaggtgatttacagaggaagttagaggagagatcagaagaagaaagaaaatattcagccaattcatgttgatcataatgttaatattctagattcaaagcctagaatgataaatttggaaagtgtcttttattctccataaaagattatgattgactgttgatatcgggtaatttagctcaacgggtacaattttaatttttaaggagcatcttttaaactgagttttactcatagtctctgaatctaaatttgtgatactttataaaagcaaattagagaaatgccaaatcttttccactaaaacagattcgggattgatatcctattttaaattccagtaattaatgatatatcaaatttgcatgtatagagtttttttttgaaaaataaacatgtccaaaatttctgaaacacaatttaaaaaaaaaattttttttaatttttttgagacagagtctcatacatgatgaaacatgtatattattgtcaaggatagtttcaatttgtaaaaataacgtattattctatgtttccaaactttacatgtctggatgtcatataaaatttcctacaacacttaattcttctcatacggcttatttcatttaatagcagtggtaggatagaacagatctcatttagtattctgttagcaactccaatatttccccaagtggacaagtggaggtataagggacacaggaatttatccaggaatgctctgctagcttgttactgggatgagaacaccaacacagattttctattgacttctggcctgggactttttctttgcaatggtttgccaagttaagtacgcataggaatcacctcatgtgcttgtttattgtagtttcccgggcctctggcagagattcagactcaaggaggctcagaatctgctctttaaataagtcctgtccagtgattctgacacagggctcagaaccacgtgttgagtgatgccggaaaaccaaggttgctcgccttctaagccctgccagtctagtttccttggtgaatgggaagtgtgttgttcctggaggcaggccatcaacagagacggatttactctgacactggctgtggtttcggttttctttggatctgaggcccagccaccagagtttcaaaccctgacagtgaacctcccatgtgatgcacaggtagagtcccttaaggtgaaggggtacttcaaaaagacagaagggaagggataaagggacaccatcctgatctcgaggtcttcataaaaaggagaaatcccccgttggctcatgaatacgaattgaggtttccactgtgtctggaggccgggctttgggtagagcagaggggaagaactctgaggattgtgcaatgctctggcagattccaagatgtgctgcccaactaatatccatcgtcagttctaattttcatgatgtaacttttttaaaaacattcctgttcccttgcctgaaggcagcctccaagcaggagagtggcagagacctcattttcctctgactgttctaagggctatttcccttttgaggcttccctcgggcaggctgccctcccttcccctgcgtgctgtggagcaaggggcccactgggcccatcagatcagtttctggagttacagccaacaagttgttttctctctgtgccacacacagaggaaacaactcttttagtgtgcaacctaggctggtttgtttttaatcaaacaacacacattggttcctaattaggggaatttcgacctgctggagcttgattggagtgttgactcaaccctttattttagagatgagaagcaaaggtcagagtccaacatttaatcacagagctgatcggcagcagagttagggttggcaaagtaatatccctcctcttacggagttcaaagtttagttttagtcaccatctgttcctgcctttaatagtttcaccccagttctgaacttttttcctttaagtctttccctgctagtgtgagtgtgaagtaccacgcaggcccatggagttctagaggtgttgaaaagggggagatttgtccagtgagtgagtgggctttgcagttgtgtctgcttgttcttctgacctggctgtgggtattagatttagatgagcagctctctggctcacatctccacaccagcctgtgtggccgctgcatcagatccacaggtttctgtgctggccccagcagtggctggatgggagcagatctctggccaccccacccccacccctgccgcacccctgcttagcttgccaagctgacaacataatttcactgccttcgcctatcctgcatgattcttgtcagcctctctcctatcttccccacaagacttaataaacctgcctggctgggtgcggcggctcatgcctgtaatcccagcatgttggaaggccgaggcaggcggatcatgaggtcgtgagattgagaccatcctggccaacatggtgaaaccccatctctactaaaaatacaaaaattagccaggcatagtggcgcacacctgtaatcccagctacttgggaggctgaggcaggagaatcacttgaacccaagaggcagaggttgcagtgagcggagatcacaccactgcactccaacctgggtgacagagcaagactccatctcaaaaaataaataaataaataaataaataaataaataaataaaaataatcctacccacccttcatccctgtaaagctctaagcataggacctggcaccaggtacattcttgttaaatgtgagctacttttattaatactaacttcatgtgcagagactcacaccaactgaactctcaatgtgtgaacgccaagcaaaggtaagtggctccagtgctaaaagatttctttccataggaagctttcccagtgcatttgggtgatggtttgctgagctttgctctttaacagagaggccatgtaaagacaacatggtagcaaacacaggctgttaatatcataatggaaaatggaatctgatgcttcaaaatccagtttgcacgaagtatcaggaattggactgttgcatgaagcaagtacacctcagatctccaaggagtgattttgtttgtgactctgcagcaataatagtaagggtcccagtccctcatgagaatccaagcaaggactttgctcccaagacacacagctatgaaacaggtgaccctcaaggttactttggtaacctcttttaaaaattgctccccacactcccatctttcccagggatttgtcaagacagtggtgatttccaacctgagcagcagcgccagaagtgtcagcaaggcctctcaagggctgtaagcatctcgttataacccagcaacctgctgaaccattaccccaggctgcacacaagtgcaaacaagcagtaagagacaaactgctttctgctttcaactcctctctaatttactatcaaatagcagggccagagatgacaaaaatgctttctgaaataacatttcccctttctttctctgggttttgcaggcttggtcctaacaactcctgggaaaaagaagggatcgcggagcaaaagcacagagttctacagcgagctgtggttcatagtgttaatggcgatgctgggcttgatcttgttggccatttttctgtccctgatactacaaagaaaaatccacaaagagccatatatcagagaaagacctcccttggtacctcttcagaagaggatgtctccattgaatgtttacccaccgggggaaaaccatatggtatgtttgtagaggtgtggccccatttccctatcactggactagaatacttgttttccttctgagaaaaatgtgtcatagccatggtaacaaggaattagatgtaagttatgtttcactaagtgtggggaccaagagaggctaaccctagaacagctttctcaactttggctgcacattagaatcacctggaaagctttaaaaaatatcactgcctggacttcatccgagaaattctcatatccttggtcttgagtagggcctgaagattggtattcttttcttcactccaaaactgattttaatgtgtaactagggatgagtatctctgccctgtaattgtaagccagggcctggtggagaagagttgtatgttgagattacctggggaaattataggttgtattactgtgtaatttggtggcggggaatgaacattaaaaggcggagatggggaggaaggggctacagtgctagtggtgctcggtctgtcctctggtcctgacaccctgtgccacagaggatggatggctcctcttagctatagaccactcactcccaaaataggaggtccagtaaaggtctagtgggagagggccccatcacttggtattacaggacagtcattgcccagagcactcattgaagggtaaaaggtgatttaattccatggtgcagtctggtgtggggctatgtctacctggaggaggaaaggctgcgttttctaatcctcatcaggtacccatctgttcaccaaagctgggcgcccacagggctacgtctccctgaggaggtgccttttttccagtttgcactaaggttctatattagctagtggctaccctaggcagtactaaaattaagcacagaagcctggtcaagctgcttacacttcaacatttaaaaaaacagcagtgagtgaacacagcagcaccatctgccttccagatctcttcacttttccagcactcagcaatgaatgaccactggttaagccccaacatagctggatcagacctaagtagcaggagtgttgggagcacaaaagggcagtgggccctccgaggtccacggtttgtggtttttgtgggaagtagcaatgggacaatgacgtggtggtggagaagcaaagaaggcactgcccaacaccatcagggccttggctctctactcacatctgtcccactcctctactcactcatcctcctcggagcctccttcctccctgagcccatcagacaagctctaaccacagggccattactgctgctgctccttgggtggctcacactcttgcttcattcacatctctgcacaaatgtcacctcccattctatgtaaaatttcctagccccttaacccacttcttttcttttctatagcatttaccacataacactaagtcagatatgtttgtctgactcctgaaatagaaggtaagctcccaggatcaatgatcttgtgggcctcttcctgttgtatgtgccccgggacccagaacggtgcctggcatatcataggcactccacgaatgtttgttgaatgaatgaatgtcgagtgatcacttcgaaccatgggctgtttgctcctgttcagtgaatagtcattaggagattctcactgaagagcagatatttcaaaatttttccttgttaaagaataactttctttaaggagcccatgttcctagaaggtgcactgctgctggaggaaggcagtggaagagagaaaagaaggcaggagagatctgtttagcctgggagatgagctaaactgaaactagggtctatggagtgcatggagtggtgaaagggaggttcccaagcactgctaggcacatctactgtataatgtgaggtgcggttacaggaaagtgtacccacataccagcaatgtccagaagtcatttcagtgatactttctcctgtcctttgacccagtccctataggcaggcacctctgtgtcagaatcctccatgaggaagaacactgtcttccttacttggttaacttagtgaccagaagacactcccatcattcttgtggagatgttatgttactctggatataaccccattgctcagggttttaatgagtcttgttaagcttcgttttgtcaaagtgaggaccatgaactatctgcatcagcatcacataggaggagcaggacctgaagttctgagggagaaactcaataatctgccattttaaccagaacctcaagaagtctgggccaggctcggtggctcacacctgtaatcccagcactttgggaggttgaggcaggagaatggtgtgaacccaggaggcagagcttgcagtgaaccgagatcacgccactgtactccagcctggacaacagagcgagactccgtcacaaaacaaaacaaaacaaaacaaaacaaaaaaagaagtctgatgcacagcaagatttgagaacagctgaaaatgaaataataatataatacaaaacctgtatgcagtgtactgtttgataaccagtagaaacaggtggtgggagggtgctggttagaccttgctgtcctgacaccacacaggctaagccgcctctggggacagacttaggcttcagctgagaaaagcggacaaaagaatgtaaacaccctgttcctgcacaccctttaccatcggggaaatgcacagtggcacccaactgattctttcactgagtggccaagactgagtcaggtgtgaggatgggaaggcatagagggactggctggctgccaggggctctgggcccagggaactggctcatcctcagcagggaagccattcattgcaggcaggtctcagcagaagtgaaatctgggatacaccagggcaccgggtggaattcccctgagcctgttgaatcataatttaatcctatccagttgacagtgtatttgcaagtcttcttctgttgctttttacaaatatttttaaaccaaactgctctcacaaagttggagaccatgagagacattgtcaaaaattagccaaactaaagagagtacaatttgtattagtagagcaaaatgaagtccctgttggtgactgtgggctcctcatctactcaggtgggaaagaatccagtcaaggggaagaatctgaataggaacaagccagattcacctgctcagttttccagattgactgtcttttcacttgagtaggtcaatgagctatgcccctgcaacacccacccacacacacacacacacacacttctccccctcatgtgacaagctctggtttcagtgctgctgtgaccctcttccaagcacccgtcttgtgaacaggtaagataccctttgaacatcagacccaaactggcaaaaggattttaggctatactctgaatggagagaaataggcagaggtgccaaggaatgagagtgtcttttgtatttcatcaacatttttcaagaccatacagtatacagtatagctaagtttaagttttgcttgttatttaattactggtttgaagatcctttcattccctgcaatactaaacaaatactggcagtggtacttaccttagacactaatcaattaatttccactcaccaaggtttttttttttttaatttgtttgtttttgagacagagtcttctgtcatccagactggagtgcagtggcatgatctcgactcactgcaacctccagctcctgggttcaagcgattctcctgcctcagcctcctgagtaactgggactacaggcgcccgccaccatgcctggctaatttttgtatttttagtagagacggggtttcaccatgttggccaggttggtctcgaactcctgacctcaaatgatccacccgtcttggcctcccaaattgctgggattacaggcatgagccaccgcacccggcctcactatgaagttttagttgcaaaacccaactttctctctctcatatatatatatatatatatatatatatatatatatatatatatacacacacacatacacatacatatatattcacatatatatgtatatatacacacacacatatatatacacacacatatatacatatgcaggtatgtatcctaggatatatatgtacatcagagcagtattaaatatgggtatgataatgctgtcattggagaaatgcaaggaatgtgtttaaaactgttccaaacatggactgatgctgccatttgttctcagtttgactctgtggctgatatatctgatgtgtcaagcaatgtcaccctaaaaagttacaccatgcactttgaggtacctctgtgtgctgcatgaatgcatgatcttttgcatggtgtgttgactgcacagtgaaaagcaggaacagatcattgatgacttccatatatccattccttggaaagctgaacaacatgagtgaaaactctactgaaaaaagaaaagaaatgggaggccgaggcgggcggatcacaaggtcaggagatcgagaccatcctggctaacacggtgaaaccccgtctctactaaaaataccaaaaattagccgggcatggtggcgggcgcctgtagtcccagctactcgggaggctgaggcaggagaatggcgtgaacccgggaggcggagcttgcagtgagccgagattgcaccactgcactccagcctgggcgaaagagcaaaactctgtctcaaaaaaaaaaaaaaaaaaaagaaaagaaaagaaaaagcagaaacatttcattgattggaccagctaaatcagagccctcagatatttagagcaactatagtttatcttacggcgcgttctaggtctaaattatgtagtgactttttctctctgatgttaatatcagacctgatgtaatttggaggctggaatcctataagaaatggaggaatatggaatgagaaatgagggagggaggagtcaatttccctacacaaatccaggacttttaaagtgaaagacaaacggagctcacatagtggaccaccatgaaataatattgttatctttggctgttctgggggaggagtgttctcaagagggaggctctgtgctgacatgtatgaagaagataccttgttcacccatcatccgtctgccttgccccaccactttgcaatgcagcaagcccttgccccacagggaacaacagccagagcaccagtgcatgagctctctaggtgccgaaaacactggccacctaacttgagtattagctcatcatctcatccttcttaccaagaaacccagggtcaccgtgttgtgggtgctcatagctgctaaattctgtaggtgacagttgttcccttcattgacaatgtgacaattgtcaggagacagtcattcccttcactgacaatgtgtgagacacaattctctgtcatatttcaagcccatattctttatatgtgaaatactcacagcaacttccttctcaggggttagccgataccaaaattccccggtctgggacacctgtgagtatccgcagcaaccggagtgcatgtgtcctgcgcatcccgagtcaaaaccaaaccagcctaacctactcccagggttctcttcaccgcagcgtcagccagctcatggacattcaagacaagaaagtcttgatggacaactcactgtgggaagccatcatgggccacaacagtggactggtgagttggtttcctcatacagggcctttgctaaatatcccagaaaaaatattggtacagagctgcctgtacttcaccgaatgctgccccatggcactcgcctctgagcacttagccagtgaggtagtaacaaccggtttactaatgttacttcagttgtttgataagcagggtagaaactttgtcttgttcttctggtatgcaatagatgcttaaaaataaatgcttattggctagccgtggtggctcatgcctgtaatcccagcacttggggaggccgaggtgggcggatcacctgaggacaggagtttgagaccagcctggccaacatggtgaaaccctgtctgtactaaaaatacaaaaattagccaggtgtggtggtgggcacctgtaatcccagctactaggggggctgaggcaggagaattgcttgaacccaggaggtggaggttgcagtgagccgagaccgcgccactgcactccagcctgggtgacagagactccatctcaaaataaataaataaataagcagcaaacaggttatacttcatatacttggagcagatgacaggaaacattggaatgggcctaaaacaaggcataaaatacaagcacttgttttactaaaacaaaaaggtactttttttgttttgccttttcctattggtgtatgggtagacgcaaaaagaatattttgtatcaacaggtgaacatggttgctttccaaaaccttaggaaatgatgacaaatgagggtgttactatttataagcttcatctttcataatttcagtccagtgggtacaaatcattggctctttgaaaggtaacctcttcgtgatataacatttattatcagtctctgagcggctacaataacaaaaatcctagaatttttgccaactatcaaatttcattgtgctaacttcctagatgcccgctgcagtacctaccattccactgggcctgttagaaaataaacagataggccaggcacagtggcttacgcctgtaatcccagcattttgggaggccgaggtgggcggatcacgaggtccagagttagatagagaccagcctgaccaacatggtgaaacctcgtctctaccaaaaatacaaaaattagctgggcgcggtggtgcgcacctgtaatcccagctactcaggaggctgaggcaggagaattgcttgaacctgggaggtggaagttgcagtgagctgagatggccccactgcactccagcctgggtgacagagcaagactctgaaaaaagaaaaaaaggaaaaaaggaaggaaggaaggaaggaaagaaggaaggaaggaaggaaagaaggaaggaaggaaggaaggaaggaaggaaggaaggaaggaaggaaggaaggaaggaaggaaggaaggaaggaaggaaggaaggaaggaaggaaggaaagaaggaagggagggagggagggagagaaagaaaagaaaagaaacataaccagctaggaagttagctcctgtgtttactcctctggggtaaaattattcacctccacttctttcaatcatctgcttctgtttttggatttgctctcatctttctcctccaagttctcacttttccttcactgaaaagttgatgacttccatgaagcctttcttgactaatagcaaataataaagggagttcgctggacccaggttccctaacactatataaaaaaatgtaccatccttctggcctgttcagaatgattgtataatatatacatatatataatatgcattttaaaatcacaggctgtttgatgttgttgtaacctcaactacatgagtccatttcagatctaaagtttttaaaaggcagggataattatatttggttgaaacaatgaattgctaactgatcatttttgacatgcaaaacagcaattgctatacattcaacataatacattgaaagttcagatgaattattacatctaatcttcacaaactgtaggaagtaggttctattatcatcctcattttttacaaaaagaactgaggtttagagagatgagtgatttaatgagagattacacagctagcaattatttttatgggtttgggttcttaaaaacatcatctgactacagagctcctatttgtaactattatactgtattgtcatttttgcttgctttttacggtactaataatgggcaatgtgcaaagggactcaataacaagcttttgaaggtgccagtacttggcaagttatctgtttattataacattataaccaacattactaaccctatttgataaatacaaaatacagcacaagagtgggaagaaatggagcacaaatagctagcattctgcctcttccatttaccgtttgaactaaatccatatatatgtgtgtatatatatgtatatatacagatcaccagaggtcaggagttcaagaccagactggccaacatggtgaaaccccatctctactaaaaatactatatacatacatacatacatacatatatatatatagtgtatatatacactaaaatatatagtatatatatgtagtgtctatatagtgtgtatatatatactaaaaatatatatatatacccccagctaatttatttttatcaagtatatatgtacacacacacacatcccactctacagatgagtagactgaggcttctgaggcttaggttaaaatatgacacaatataaccctcaaatcacatatacattttgaattagtctatagttcatgtgtgcatgtgatgtgatcctttcaataagagaaatttaaggcaaggtctgttttagaccccaccatggtgttgagaataaaaaagcctttaatacttattactttttacacttaattgatataactataaattgatagcaaatactattgatagcaagtatgtagccaatgatgattggcttatttttcagtatgtggatgaagaggacctgatgaacgccatcaaggatttcagctcagtgactaaggaacgcaccacattcacagacacccacctgtaaaggatggaaacccagaagacgtaaccctggaatgcaaggtctgcacccatttcctcctgggttatcactcacacatcataaatgctgaaaagccattgtttattatcctataattctttaaagaaatgatgactgtttttgaaagtgttccttcctaatagaggtctaagaaatgatatttttctcatcttaaatgagagagaatattcatatgaaaatacttgatttgctcttattttgtagaagacaaagaagtatgtaattgtcacttggttctgtttggcagtgatgctcctggttaactgaataatcagtggcaatttcaagatggctcacagttgttagaagtagtaagttagttactggctcaaaaatgattctgttgaaaggatgtcactgctgttcatttctatctgccatttctgtcagggttgacacaatcctgcaagaatagttattctaatgatcacagctgctaaatgaatcccaaactttgcaccaggtcgacaaacttttctgaaggttctatttatttaccatacatagggttacttaccaaactttttgacaaggctgaaggttctatttatttacaatacatagggttactcaccaaactttttgacaaggcaacacataacttacacataaatgtctctgttcttgcatttatgaattttccaaaaatctaaggagtaaacagcttatttatacattttgaggagaaaacaaagtgtttcactaggaacacctctacttgaaccaatgtttttatttcatatattttatagttttgaaactagtttctcataaaattctgtcaattcactgaatatcagagaatactgacatcttcaacctagcacatttcaaatggaaactactgttctatttgcaatattaggctgcgtgaaattttaaaaggaaaaatgtatctgttccttctagcattaacatatatacatgtagagacaagactatacctatgtgtatatatatgtatatcatgtatatattactctgcactatatcccttctttttggagaactagccattattttagccacagaatcagtaagaacagatgatatgcaacagtaccaattacggttcaaaaatgtctgtcacctgctctagttggattacaaagtcattggtgaaagtcctatggcaagaaaaattttcttgcaaatcatccacataaaatcagatatttaaatttgttcttcatggaaaacagagtaagaaaacctcttgtcttccttcatccttaaaggtctttgtgaccccaggaaaatattgactctgtctaacacacaatagtcacaatactttttgtgaatctacaaccagagacaggcaaaaacttgtaaagtaagggatagtcttacttattctgcctgaaaacaatgtattaccccagggcccaacagtaaaagattgtggactttttgggtattgagatttcatctagctctgtgagagagcagctcctcagactgaccaactcctagacaaagtttgccaaccataagtgtcaaaagcacaggccagtattaagcagaagttctaccaccttattagaactgctataaacaaaagcatctgaaataattgtgcacatctggcagtgactgtagaaaatacgaaatatatatttctcgccaagtttttatactttctgaaatgaaaacataggattgactagtttactggtttttattcccatatgccgattctgggacaataaagttgtttaaagctggcacaaataagcattaaccaaggctgtgtccaccttctgtgagctacttaaggtatataggaaaggagtggtcacaaacttgcatcctaatccttggtggactcttctaagaatacagtttgctagtcacaaagaatagtctacaaatatgctttgctaggttcagaagattgagtttatcctgatttttgaaaaattaaccaggtatctttatcactgtgtatttttccaagcacagtataaaattttaacaacgcacaaaaaaatacagaactgcaggggattttatcttggatcattatccatttaatcatctaattagacatgaactcagttagctgaatcatttacattttgactccatagcttagggcagacagaagcctgtatggcttctgcccagaactctgtcccctgctacatgtctaagtttacttgtatttatttcagagaagaactctaagatgttgctttgctactttaagtggtattgcgtgccaagcctctattatacaaaccatgcagactcgcctctagagattctgattcggttgatctggggtgtgtggctgaggcatcagtactttttaaagcttccaggtgttctaatgttgagacccactgatgttccacaatctggaagaaatcatgtacaggaataatatgctatgcacagggactatgctccttggctcaccccttctcccttataaacaatgagcagttcttgatgaacctctttaaatttaaatctcctgactcacattttaccaattgtacatgccacattctcagcttacgaactaccatgttttgttattcttaatatcaactgtttggtaagagtacagttgtttttatacactctaagaaatgtgtttataatctactgtaatttccactaaatggaacccaaatattaatgttatggtaccatatactgatgtaaaaatcatgctggcatccatgaacacaccggtaaataaaacatagtccaagtggaagaattcattaataaggaacttttaattatgtcacaaatgaatagttggtttccaatgcacaaatatcatgtaaactaatctaaagatggtttgcttaataaatatttgaatgtgacctaa

SEQ ID NO: 27 - DNA, 142329 bp, Homo sapiens
  source 1..142329: mol_type = genomic DNA; note = WRN_gene
gtgtactgtgtgcgccggggaggcgccggcttgtactcggcagcgcgggaataaagtttgctgatttggtgtctagcctggatgcctgggttgcaggccctgcttgtggtggcgctccacagtcatccggctgaagaagacctgttggactggatcttctcggggtaaagtgtcttcctattcccgttttcccagctccgtgccccggggtatctatagtgctaggcttctgagacacgtggaggcgcttaggcccgcggagcaggcccctgggctgtgtttgggagattctggaaaaacagactttctcccttttcctttcccctctggagcagctgggaaaggcgtctctcggagcttccgccattcagaaagtgtttccccgcccctgacggccccagcttgatgtttaccttgcgcgcttagttaggattgctctttctagtacggcctttattatggcagaaattgagccactacaggtctgcacagcaaagtcgagggaaataacctgctgtctatgatttagcaagtgatgatggatatttttgagttcaaatcactcagtctttaatggattttcttttctttttttcctagttgaatctcagttgttctcaggctaggtttgatatgaaaaatactactccctattgaagagggtaatataattcttaggatgctaatacaggagtctgtaagtcggagtacttcaggctttttatggttcggtacatttctttttaggggtgggatattgggataagtaggacagttcagatcttgatgtcattgaatagtggtgtctacctaaaaggaagaggctggggcacaaaattataatttaaagtgtttacttcagccaaaatgaggacagctgcccaggactcatttcccagttgccttggggagtgctccttcagccttggttacaagcaggtttttaaaggcgaaggggaagagtgggctgagacaaagttggtcaggaattgttattggtttacagagataccattgcttagtgattggctgtacactgtaactcatagggtatgagttatcgtgtccagcatatggcattttatggcttcttggttccagtctagagcccatatagcaggtgggctttaagagataattatccagctcagaccgggagtgagacgggactgttttttcattctaatgcctctctgggcctgataatttaaaggggcttgcattcttcagctaaaattttattttcttttattttttttcccccacagtggtctccctttattaatccaacaaatgtttattaaggactgctctaggcactagagataccaacaatgaacaaaacagacaaacatctctctccttttggagcttacattttagtggaaagagacaggcaaaaagtaaaattataggatgacagaaggtgaaaatagagattaaaaaggaaagggggatgaagagtgtgtgtgtgtgttgtgggtggggggctgtagggagctgcagttttacaataagtggtcagggacgtcctcgctgagaagggaatttttgagtccagagctcaaggaagtgagagaacttaccttgacgttctctggaggagaagaaagtacaaaggccctgggggaacctgcctctttatgttcagagagcaacttaagaggcctagtgagctggagcagagcggagaggaggtcagaggtcaggccagaaagggaaaggggccagaatgtgtaggactttatgggctatattgaaaattggggctttcattctgagggagatgggaagctgttggagagttgttagggaaacgtgatctgaattatgtttctaaaaaattggagtaagatatcataaaatttgccatcttagtcttttttgtatctggccaattccactcagaattcttttttaaacagctttattgagatataattaatatatcatatgattcactcatttaaagtgtgcaatacaatggtttttagtttgtcttcagagttgtacaacctttatcacaattacctttaggactttttcattacccaaaagagaatctccataaccattagtactcaatcccacccgctttcctagcaatcacttacctatttttttgtctctatatagctctcaaaccctatgatattccttctatctaactgtatttttgtactcattaacagcctctcttcattcccaccacccatccatcccagcctctggtaatcaccattctacttactacctcaatgacatcaaattttttagctcccacatataagtgagaacatgcgatatttgtctttccctgcctggtttatttcacttaacagaatgtcttccagttccattcatgttgctgcaaatgacaggatttcattctttattatggcttaatactattccattgtatatgtatatcacattttctttatccactcatctgttgatggacagttagcttgattccatattctggctattgttgaatagtgctgcaggaaacatggaagtgcagatagctctttgacatactgatttcatttcccttgaatatataccctgtagtggatttgctggacccgcttgtagttctacatttaatattttgagttatttccataatgttagtaataatttacattcccaccaacagcgaggaaggagttcccttttctccacatcctcgccaacacttatcttttgtctttttggtaatagccattctaacaggtgtgaggtgatatctcattgtgattttgatttacatttccctgatggttattgatgagcaatgtttcatatacttgttggttatttgtatatctccttttgagaaatgtctattcaggtcttttgctcattttttaaatatggttttttaatttttttatttttttgctattgagttgtttgacatccttaaacattttggaaattaacctcttattagatgtatagtttgcaaatattttatccgattctgtagattctgtcttcagtctgttgaatttgctgtgcagagaagcattttattttgatgtaatccctttgtctatttttgcttttgttacctttgcttttgaagtcatatccaaaaaatcattgcccagatcagcagtccccaacctttttggtaccaaggactggtttcatcgaagacaatttttccatccacaggagggaggggatggtttcaggatatttcaagcgcattacatttattgtgcactttgtttctattattattacattgtaatatatagtgaaataattatacaattcaccataatgtagaatcactgggagccctgagcttgttttcctgaaacttgagggtcctatctgggagtgatgggagacagtgacagttcataaggcattaggttcttctaaggagcatacaacctagatcccttgcatgcgcaattcacagtaggttttgcgctgctatgagaatctaatgccaccgttgatgtgtcaggaggtggagctcaggtggtaacgtgaggaatggggagcagctgtaaagaaaaatgaagcttcgcttgcttgcctgctgctcacctactgctttgtggcctggttcctaacaggccatggactggtactaatctgtggccctggggttgggaacctctagccctgaccaatgttagggagcttttttcctgtgttttcttcaagtggtttcatggtttggggtcttacatttaagtctttagtccattttgagttgatgctgtatgtggtgagagataattgactactttcattcttttgcatatggttatcagttttcccaacaccgtttattgaagagcctgacctttccccattgtgggttcttggctcttttgtcaaaaatcagttggctataaatatgtggttttatttcttgggtctctgttctgttctattatctgtgtgtctctttatgccagtaccgtgctgttttaattactagagtttagtatattttgaagtcaggtagtgtgatgcccctagctttgttcttttagctcaacattgctttggctattcagagtcttttgtgaggataatgttttcaaggttcacccatgttgtggcatgtatcagaactcgatttctttttatggctgaataatattccatttgtttatattatatatatgccatatttatttattcatatgttgatggacacttaggttgtttccaccttttggctattgtgaataatgctgttattaacattggtgtacaagaatctgtttgagttcctattttcaattcttttgggaatatacctacgtgtggacttactagatcacatggtaagcttttagtttagctttttaaggaactgctaaaactgtttttccatgggagcagtgtacaagtgttccagttctccatatgctcaccaaaacttaatttccttttttaaaaattatagctatcctagtaggtggtgggaagtggtatcttactgtggttttattttgtatttctttaatgactaatgatgttgagcatcttttaatgtgcttattggccattatatgtcttctttgggaactgtctattaagtcctttgcccattttttaattgagtttttttttctgttgaattgtgggagatctttatatattctgaatattaaacccttattgggtgtatgatttgcaaataatttctcccattttgtgggttttcttcactttttgatattgttctttgattcacttttaaatttttatagagtccagtttatctgttttttcttttattacctatgcttttggcatcatacctaattcccaaatccaatgccatgaagattttctgttatgttttcttttaatagttttatagttttactttttctattggagttttaagtaaattcttgtatattagtgtgatacattttaagttatttttgtatatggtgtgaggtaggggtccaacttcactcttttccatatggagatccagttgtcccagcaccacatgtttaagagtctattctttccccactgaatggacttggcacccttgtcaaaaatcaattggtggtaaatgtatggatttactcctggaatctcaattctattctattgtatttatatttctgtccttatgcctgtaccacactgttttgattacagtagctttgtagtaagtttagaaattgggaaacatgagtcctccaactttgttcttcttttcaagattattttggctatttggggtcccttgcaattctgatgagtttgaggatcaccttttccatttctgcagaaaagccttttgatagggattgcattgaatctgtagataactttgggtagtattgacatcttaacaatattaagtctttctatgcataaacatgggatatctttccatttatttgtgttttctttaatttctttcagcagcattctgtagttttcagagtacacgtttttcacctccttggttaaatttattccttggtattttattcttttagctgctattgtaaatgcagttactttcttagtttcctttcagattgttcatttctggtgtataacaacagctgatatttcaacgttgatgttgtactctgaaactttgttgaatttacttattagatctagtagctttctttgagatttttatatgggattatgtcatctgtatatagagatagttttacttcttcctttccattatggatgccttttatttcttttccatgtctaatttctctggctagaactttcaatatgatgttgaaaagcagtggtgaaagtgggtatctttgtcttgcttcctatcttaggtggaaagctttcagtctttcaccattaagtatggtgttagctgtgggttttcataaatgccctttatcatgttgaggaaatacccttttattcctagttttctgagtttttatcatgaaagggtgttggattttgtcaaatgccttttctgtgtcaattgaaatgatcatgtatttttcctcccttatcttaatgtaatgtgttatattgattaattttcttatgttgaaccacccttgcctttctggggtaaatttcagtcacttatgttatatagtcctttaaattgtgttatcttataacagaatcactctgctactgttttgagcataggccatagggaaaagcaggtaaaaggtaatatggcttgaaccaacattgtagcagcggaagtggtgagaggaggtcgaattttggctttgttttgaagatagaaccaacagtatttgctgacagattagatgcagaatgtgaaaggaggagatgagtcaggatgaatccaaggcttttggcatgagcaaccagaaagatgaaggtgacttactaagatgggaaatatacaaaaggagcagtttggggaaactttatatctattgagtggaatatgccaattagagattcaaatatccagtaaataattggctatcaaagtttgaagttaagaggaatggtctaggctgtttatataactttggaagtcattagtgtataacagctaatttaaaagccagcagactctaagggagtgagtgtagagggagaagagtagaggtctgtgacttgaatcctggaatgctgtgatgtttagagattggggaggtaagaaggagcagcagagtatactgaaaagggattgttatactgaaaagggattgatatagatggagactcaagaattatcacagaaacctgataaaatgtttcaagaagatgggtgtgattaattgtgtcacttactgccggtacattgactcagatgagcgttgagaattggctataggatttgacaacataaaagtcattggaaaccttgacatgagcccttttcgtggagtggagtggttacagtgggtttaagagaggattaaaggagtggaaacagagatgctattatagatgactcgtttgagtagttttcctacaaaggggagaataataatggagcagttagccaaaagttgagtttttttttcttcttcttttttttagttggaaaaaattgcgtatatgttgatgggtcttttctggcagaccagtagagaggaaaaagttgatgatgtaggagatgggaaaatgtctttgagtagatgtcttcgagaaaatgtctttgagtagatgagaggtttgcacacatggagaggttggatgtaggagtactgatagttcatccatagttacataagaaaaggtagatgtattagagttctcctgagaaacagaaccaatgggagatctttatatctctgtgtccatctctatctgtatttctgtctctgtatctatgaagagattataaaagttttaagatctgccaggagacatacccacgggagctaatggtatagttccaggccagttgtgaaggcctgagaaccaggagagcctatggtgtaagttccagtctgagtccaagtctgaaggcaggagaagaccaatgtcccagctcaaagacaggcagagggagcagatcttcccttacttagcctttttatttattcaggccttcaacaaattgaaggcccacccacattagggagggcaatctgctttactcagtctactgaatcaaatgttagtctcacccagaaacatcctcacagacacacccagaataatggttagccaaatatctgggcaccccatggcccactcaaattgacacataaaattaaccaccacagtagagtatatgggtacaaatataattatgtgatatagatttcagggtaagagcctgtggaaattcatttttgattgcttctagtgaaatcggaagcaagatcatcagctaagagtgacgatcggtggaggagatatgaagtttaagtggagaggagaaggtataaaatagtcttaggaggggaggatagtaaatagattagggaaaagttgtaggattgccaggaagtagtaagggcccacttgaggctggtggtcacaaatttaaggtgagaccagtcaaaatggttgtgcttttcacctgctgcattcattcagctgcataggtacaggcacagagtaggtcaagagttcttttttattcggggttagagttttgccaggagatagtaataaagccagaagggcaatgaatttgagggagtatgcaaggaagtggctgttaacttggagtttaaactagtcaagaagagaattaaggactgcccaaggggtgaggacaatgatatggtagcagggcccttaaaagccccagttagatgaaaagattgttggaattgagtttctagagggaatgaacttgaaaaacaggaggtgttggttggagagtgggatatatggaattgagattatggaaggattcagtcgttggtaataacatagtatctttgtaggaataaataggtggagcaggatgcagacaagatcactggaggagggctggtcagaagactgggaggcactatctcccttggatattatacatcaaagcttgtgatctactagacaagtagtggggaaagggtaggatatagatattaatggctatagttttgatggtgatggtcatggtgatgatgatggtccattaacactcaactcaaataccatcaatttgatttatatctaacaccacaaagttaggtgttgagttacatgtggttatattgtaactaatagtcagcccttcatggacttctattctttgatgagactcttcttgtaggagtagtaggtgccttaaagcaccttttcatagttgtcagattgaaatccttcaccagtgttttaggttaaccctgttactgtggaagtttctcttggctttctgtgtgggctgcttctttgtctagttttaccttttggggttagcatactattgtgaataatttattggtgagaaggtaagcagagaagtagagtactctatgacctagtaatttcatatctaggaatctatcctatagaaatgataggaatgccttacaatacccacatatccacaagggtattcattgaacgttatttttggtgaaattcgcaagcaacctaattatcatcaatagggaattgttaaattatgatagataaaatggaattctattcagtcttcaaaaagtcagatcaagaagtggtcttacattttaattatcccatcctgtcaacaagagtgtcttcagttgcaagtaatggaaaaaccattcaaactgacttcagcaataaaaggttatttattggtctgtttcatggagacatctgaggtagagtggccttcaggcaagttcactcagggatccgactatttttctggccttattcttggccctcttctatgaaaacaccttcagggtggtttcttgtatgcttgtaagatggctacttgcatcaaccatgaccacatctagcaggagcaaaagcatcctttcccgtaccagaggagagtcccgaaatttgttgcaattggactgccttggaagcaataattatggccaggagatggaggctagagaactgagacctgatcatagctcctatccttgaatcagttgtatagcaaggggaattggattttccttaagacagttggatttcacctgtagtcttggtgatgaggtcagttccatccataaaactttgctgttacacattttgggatggggtgaggagggctgaatggagattaggatgctattgaaatttgctgtacacaatggatcattatcgtcttctttcttagtgttaaggtaatcagcctctttttcctcctcctatgcttgactttactaaaaccatgagacatgtttaacctcaggactccaatttgaaaaaatatagactgttatttactttattacttacagaagcccttcatactactctcagcaagaaagaggtaggcagggagtgagggaggggggatcatgcttactgagaaacaaactatcgagtattgaaactcccccttcatatgcctgacctcagtcccattcagttaccagtaggggcccctattaattggtacctcaccagcttttgctgttcgttcataaaactgagtcattgaagtacagtagaaaaataattggactacaagataacttatttccttccataattgcaaaatatctgatttttcttcttgtttgtattatgtaaacttaccctgtctgagggtcctcctggattgttctttgcatttatatatacatagaatttcattttcttttttcttgttttttttttagacggagtctcactctgtcgcccaggctggagtgcagtggcacaatctcggctcactgcaagctccgcctcccaggttcacgccattctcctgcctcagcctccccagcagctgggactacaggtgcacgccgccacacccggctaattttttgtgtttttagtagagacggggtttcaccatgatagccaggatggtctcaatctcctgaccttgttatctgcccgccttggcttcccaaagtgctaggattacaggcgtgagccgcttgcccgaccttcttttttttttttttttttttttttgagacgttgagatagagtctcactctgttgcccaggctggagtgcaatggcacgttttcagctcactgcaacctccacctcccaggttcaagcgattctcctgcctcagcctcctgagtagctgggattacaggcgcccgccaccatgctctgctaatttttgtatttttattagagatggggttttaccatggtggtcaggctggtctcgaactcttgactacgtgatccgcctgcctcggcctcccaaagttctgggattataggcgtgagccactgtgcccggccaatttcattttctattttgaaatttaaactaccactgacacttcgttttccctctgttttacttagcatttatcttagagaataatcttaatatgtatagttctattttattcttttactggcagcttagtatgccatattttggatgtgtcattgtttatttacctattaatttaccctataactgcttcccatatttttgcttttacaaagggatgtaatgaacatcctttacatacgtctttgtgcatatgtgcaaatatttccataggatagatgtaattactgacttgaaggttatgcagatttaaaattttgatgccttctatgaaacatctttcaaaatggtgatgccagtttcttctctcgtaattactgcatatggtcaatcttttaaatttttgctggtaatgatatttcaaaattataaccagttttttggcctcatttcttgaataacttgttttttctcaaagataagaaatgtctccttcatcgtatgtcaaatttccatatttacatggatctatttctggacatggcaagttttatttatttattgtatgtatttacggtgtacaacatgatgttttgatacacatatacgtagtgaaatgattcctacagtcaaacaaattaacatgttcaccaccttccatagtctctgcagtcttcaaggttttctctatatgggattagacatgctatgtctgatctgtttttgtatttttacaccaattccacactaattttttttttttttttgactgggagtctcgttcttattgcccaggctggagtgcaatggcatgatctctgctcactgcaacctccgcctcccaggttcaagcaattctcctgcctcagcctccctagtagatgggattacagcactcgctgccacacctggctaatttttgtatttttagtagagatggggtttcaccatgttggccaggctggtctcgaactcctgacctcaggtgatctgcccgcctcggcctccgaaagtgctgggattacaggtgtgagccacctcacctggcacacactattttaattactgtagttttaaaagtttcatatttagtagggtgagtttttccttgttggtcttgtttttcaaaaaaaatttgctgctcttgagtattttctcttcccagtgaactttaatgtaaactcacgtggttcaatgaaaaattctgatgactttttttcttggtattgcttcttgagtgtattgatttaattaatatatttacagttttgggtctggctgtgccgaaacgcagtgtgtcttatccagtccttttttaactgtcttaataaaatttgctggttatctttaaaatggatcttgtatattttatgttaggtttattcccaggcaggttgtcatttttgctgttactgattttggatataaattttggatataattgtataatttggacttggatataattgtatttgattctgtcttatatataaaaatgagataggataataatttatcctaggataaaaataatttgagtatccttattttgcatctggtaccttacttgctcctgttaaacaaatagataaaattacttgtcttcaaagagatcctgtggaaaaattatttattttaggagactttggagctttgataaaaattaggcttatcttttgtaaaagctggttagtgatagcaatcagactcttttaaaggtgatttttttttctttcctttgataaaatgcttaatatgagggaggattaagaaagaggatggcttttgaacagtttcttcatggggaaataagaaattagaataatttcatgttctccaaaaaaaggagaaaaatgaccttccctcctgagcctacttcaagcctctgtttctttctgactctattgttctcatctctgcatttttccaatctcttctactgttagtgttttaggctagctcctcagtggagggcagaaattcaccttctctttagctgtctttgaaaccaagaagatagaggtatgagatcttcgtagtctgtagtaagaataatagaagccatcagaaaaaaatatcaaagctttgtagctgctcctggaagttttgatgtgaagcaggagacatcacctattggtacctgacttgcttttgctgttcattcataaaacagagtctctgaaatacagtagaaaaataattagactggaggataacttttttccttccaggaattacacaatcacaaaattgctgatttttcttcttattcatgttacataaacttatcctgtccgaaaagactgtatttgaacttactatgtaagatttgctttaggtaaatttatggctgcttccagaattgtgtattaattttccagtttcttttttaccagtctccacttttacctttccctcttccccctatacttaaattggtcttactgtaaaatttatgcgtttctctttctacctggcaatgctgattttttttttttttttttttttgaggcaaggtctcactctttcacccaggctatagtgcagtggcaagatcgtggctcactgcaacctcgaatccctgggctcaagcgatcctcccacctcagtctcccaagtagctgggactacagatgtgtgccatcgcacctggctcatttttgtattttttgtagagatagtattcgccatgttgcctaggctggactcaagccagcctcctgccttagcctcccaaagtgctgggattgctggcacgtaccactacatccagccagggctgagtttctgaatcatcattgcagcaagagaaattggattacctttagaccactggctctactgtgggctgggagtgggacaccttccttaaagcgcattggacattggctttgtgggtaactgatctttacctgaatgaaatttatcagtactgtattaagggtctagggtggaacggatgctagcaaggcaaccgttaacatccacttactgatgaatcctataaaattttatttcaggccatacgaagtaacagtaataaatataaaaggaaaaatagacaacctaagcaactttttaaattgacttacttgaaaactttccctgcaatttcccggtttataatggttgatttcagctgactggctatagctacttagagaacagaggaaattcattaaaaataatgaattattcagttgggtagtgaaatccagttataaagcacttcgctgtgccatggattcagttcaggtcaagtgatgttcctggtttatgggcagtgtggcttctcactatgacacagcaaagaacgtagcttttatcctttacccttgttactaactaaaattaatggcattttattgtgtttatttgtttgattccatttacagtttatttcacttggttttattagtacaaaattgtgctttatataatatttgacagttaggaaaaattgttagatacctataaagaaacaagtctctcaaaaatcatcctactacttttaaaaattacatcgtcttactacagttaacctagatgtgaatgggtagttttatttagcttttctggtttgtttgcttggtctgtttggagggaagttaagattagcagaaatgtagtaatagattcatgaaagtcttgaaagcttctttaattagagaatttaatgagggctttggcatgcattctttggtttttctctgttttcctctaccccttcttattctttttggttcattgaaaagtagaaagaaattctcaaaaaccgtacaggagaataccttataaatgatatcttctgcaataaactatagattgtatatatgtatatgtatctagatacacaatctgtgtgtgtgtatatatatgcttgtgtgtgtataaatgtataaattagttactagtatatacgtaagtataaaacctcaatgtgcaaggttacattttcagaaaatatgtaatataataaaagaaatcaagcccagaatttttaaaaagtttattgcgctttctgttaaaaatgaaaggctttttgactggaagctgcttctcagtaaaaataacataattgtgttggtgaagcccaaagattctaatgaaaattagggtattgacaaccaaacggaattgctggagtacttaagctgctttggttttgtaatctttctgtgtcagaatatttgaaaaacacttattaatccagtcttgtaacttatccttgaaatctcttttttaatattcttttccacacacatgaaaagttagatgagtgtatgaatttctgttgtcagactagttgtaaacctcctaaatatagtttctgcagtatagttaaagagaaagaacatcctggctaacacggtgaaaccctgtctctactaaaaaaaaaatacagaaaatgagccgggcatggtggtgggtgcctgtagtcccagctactccggaggctgaggcaggagaatggcgtgaactcaggaggcagagcttgcagtgagccgagatcacgccattgcactccagcctgggcgacagtgcgagactctgtctcaaaaaaaaaaaaaaaaaaaaaaaaaaagaaagaaaataggcccagcaaggtagctcacgcctgtaatctcagcacattgggaggctgaggtagggaggattgcttgaggccaggagttcaagaccagcctgggcaacatggtgaaactccatttctacaaaaaatacaaaaattagctgggcatggtggcatgtgcctgtagtcccagctacttgggaggctgagtgggaggattgcttaagcctggggaggttgaggctgcagtgagctgtgactgagcaacagagctagactctgtctcaaaaaaaaaaaaaaaagagatgggttttgaaattcagtactttttttgagtgaggtccaatgggtcagaaagaagcattggataaatgaatccattttctcttctctgtttgaatttgtaatttgaaagaatattctacctataaagtacttcagtgcttaattagctgtcagtgaatttatatatcttatctaattcatatggatttgctatttttatctgtacctacagattcctgacctctctaaggggatcccagtatactatagggaatgaggtataatagaagtaaaagacctatcactagtcctgtcatcattccaactcatgtgtaattatagtttaaaagaagtgacatcatgtgtattgctgtttatctttacattaatcttgtggtcaagaaagcaaatactataatatataataattatataatatcataagacaagtaatataataatgggaatataatcccattttacaaatgaggaaatgaaaatttagagaaataaagtgacttgtccagggtcacatggatactaagtgaccaagtgtcaaagcagaattttccaaataacttaaagataattcttgtacaaatatagaacgaacacatgtcatatgtgttgtgttaatgagggaaccagaaggatgacaacattggttcagagagatgcaaagataaatatagacattggaggaaaaagttggaaataagattgttaggttagatacaaagctgtgttataggccaataaaaaccatagactttgaggttatcttttttactggacaggattcagttacacctttatgagaccaaaatttattatttaacatgtggatattagagtctgagttttaaaattattagtaaatgaccgtcaaataaagatatgtcccctaatgaaatactgataatcgctgggtgagcttgtgctcctatatgacattgaaatgacatactgccctctctttgtcttctaagttttggatacttttttttttttttttttgacacaaagctgcattagaacctaggtttcttgattttcagtccagatttctttccactctacttcctgcttcttcatagtataattttcaacactagagcagtctgcataacttttgcaaaatcagctagtctttcttattagttttcctttgtgcaaagtgatgtagatacagctttcttcttcagagaaacattgtgaaattcaatgaatatttgtaaaatttgcatacgtgcccaatgtgagaaattgaaattattacttaagtattgcaactgttcttttaggatattttgtttgcaaatttcagagtaattataaatattcttgcatttttattgtaatcagtatttataaaacagtgtatttcatcacattaacctttacatattttgaataaaatagtattgaaccattttaaatagtaagtggaaatttttccacattaaacagtataacgggctaacagagttaagcattgcattatttaactaataattttttcctgaacttcagattattatctgtatgtgtcatataacttgacaattttttttttttagtgctttttaaaaagagtgggatactttattcagtttagccctcaagcaattaggcaagtcagttaccatggtaacagtaggtattaatttccttacctagttagaggttttatgaacaaagaaatctctgagttcatccaccaaaacccaactttctcttgagactggcctcttgagactggtgttaaatttgtctattttctagaagatgacactattctaagtggaaaatacggttctcttgaggtgaatttctactctatcaagagtgaagtagagtatggcttaaaagttaagtgattaaaaagctaccctttcttagctaatttggaatgtaattggtcttaatttttctaaattcgttctaaccaaaatcttattggcgtgatttctattgacatgaactagaagtgacttcagcagacaacttgtcccaatatctaaatgctgtcaaatagaatcacttaagatgaatttcttccaaaacagagttcacaattttgacagataatctcttagcatttaattgactagtattaccaaccttatggaataggtccactcgtttagctatcatgaggaccattttgcaactaacttatcaaaaagccttcaccaagaagttgcatatcttattgatattttagaatgcgattatggagattaaaaatcaccacaatgggttgttaataacgccagccttgaactttcagttttagagcattttatctgtgttctgtagtcaaagttggtaaggtgtccagtgggtcatgtttgacttgctgcttgtttttgtactgtgtgctaaatggtttctacatttttcagtggttgaaaagtcaaaagaagaataatattttatgaaatttaaataaatccaggtttcagtgtctataggtaaaatttcattgtaacgttgttatgcttaagtattgtttatgacttctttgctatagtgacaaacttgagtagttttgacaaagatcatctggcctgtaaggcctagaatagttactgtctaaccctttagagaaaaaaattgctggcccttgttctatagtatgaaaaaatatagccttgattattcattaaaaaattattttcccattttattgacatacttttgtcccctgattgttaaaaggaatgcatgttcttatagaaaagttggaatatatagaaaagtataaagaacaatatgaaaaaccatttgcaattgtgagataaccactaatgttttggtatacattgctccagacttacacacaaacacacacgcgtatttattttatacaattagagtctaattttttttttgagacagtcttgctctgttgcccagggtggagtgcagtggcaagatttcagctcactgcaacctctgcctcctgggctcaagtgattcttgtgcctcagcctcttgagtaactgggattacaggcgtgcaccaccatgtccagctaatttttgtatttttagtagagacggggtttcgccatatgcccaggctggtctcgaacccctggcctcaaatcatcggcctgccttggcctcccaaagtactgggattacacacgtgagccactgcgccttaattttttaatttgcttttttcacttgaataattataagaacattatttttaatgactgtgtagtgttctgttttatggatgtaccatacttaattatttagtcataatttattattatgaggttgataaacatgataatcagattgagctcaagaagctagttatagggttgcacaattaatgaatcccaggtacctcgctgggttgctgaggctgctatttttttcctgcctgtttggaacactgtgtttgggaccaatgaggcaaaagaaattgaagagctgccattttcaattattctattagaagatacattgaagatttgtcaaatgacatagacacaacactaatccagaagattatttaatcaaaaaggcattcatttcagatatgaattcataaacatttgtaacgatcctcagtttgaagaccatatagaatccctgaagaactggaagacactatttgcttggcaaagagaagtccccagaccaactggggatgaaatattcaaagagataaatgaatactttgaaacatacaaggtactatggaaaaagagtggaagtttgggacaggtaatgacaggaagatataaaagctttacattaagttcaatctaaaactttattccaagtaacaggttgtcttattcatggagaagcagttgtaaattaaaacttgcctgtggtttggaatttcacattaaatgattacattaaaaattcaaatggtgaacctaactaaatccaagctcctacagtaccttcttttcacctttaggtgaagaaatgcggtgagctattttattactgattatgtggacagtccaaaggaaggttcataagcgaaaaggaaaaatttaaattattccatgtgagcgattcttactttgcagatttgttgaagtgtagttactggcttcaaaaagtggtatccttaactgacattttgaacacttgaattcactcaataaaaaaatgcagtgatcatgtggaaaatacattaaggtatatgacagagtttatggattcagagcaaaaattcagctttggaaaagtgaagttaaaatggttttttaagtgatgtttaattggtgttatttgaatcctaaagaagaattaatagtactagtagaggaaagtcagtgtgtctgtgacaaagctttagtattattttgaaatacttgatataaaaaagttcacgtttactcaaagcttacttaaatcatcagaataaattaacatgtttcttaattaaagaaaaggagaagctattagacttaaaaaatttttgcacccttgaaatacatacaatttgaagagattaagttgttggaatactggttaatggtgaaaaaggagttttcagtctatgaaagcaaagccttctcctttgccatttgcttttttgtagtggttgctatgtagaattcgaagaaaatattgttaaaaagtcttggtcaggagtagagtgtagcatgaacccaatgcattttaacgttaataatgaggaaaaagggaatgcatgataatttcatcaagtcagaaaaaaatggaaaaagaaaaagaggaaactgaagaaagtaactgatgaaagtaaggtgaaagggaaaacaactttttataccacctgtgaatgagattaattttcgtttccatactgaaagacaaatatattccaattaagccattcaaaataaaaaacaatttttttttggtaagagatgggatctcactatgttgaccaagttagtcttgaactcctgccctcaatcagtcctcctgcttcagcctcccaaagtgctaggatttcaggcatgagccactgtgcctggccaaaaccaaaattaagcaacaaaacaacaacaacaaaaattccagacagcctttaaaataatgataaaggttgaaaaattgtagatagtggtaggtagataagatttcaggaaaagtccaaagcaaatcataatacgttattttaaaggggggtttaaaatcctttaaaggtacaatgtgaagcattatgaaatgataaaatacatgttttttaaaaacattaattttattttaagttccaggatacatgtgcaggacgtgcaggtttgctacataggtaaatgtgtgccatggtggtttgctgcacctatcaatctgtcacctacatattaagccccgcatacattagctgtttttcctgatgctgtccctcctccaggacccagtgtgtgttgttccccatgtattctcatcgttcggctcccacttataagtgagaacatgtggtatttggttttctgttcctttgttagtttgctgaggataatggattccagttccatccatgtccctgcaaagtacatgatcgtgttcctttttatggctgcatagtattccattttatatgtaccacattttctttatctagtctatcattgatgggcatttggtttttttccatgtctttgctattgtgaatagtgctgcagtgaacatgaacatgtgtgtgcttgtatctttataataaaatgatttatattcctttgggtatatacccagtaatataattgtataacccagtaataggattgcagtgtcaaatggtatttctggttctaggtctttgaggaatcgccacactgtcttccacaatggttgaactagtttacattcccaccaacagtgtaaaagcattcctatttctccatagccttgccagcacctgttgtttcttgattttttaataaacgccattctgactggcatgagagggtatatcattgtggttttgatttgtatacaaaaaagatttgtatttctctactgatcagtgatgttgagctttttttcatgtttgatggttgcataaatgtctttttttgagaagtgtctgttcatgtcctctgcctactttttaatgggattgtttgttttttttttcttgtaaatttgtttgagttccttgtagattctggatatagacctttgtcagctggatagattgcaaaaattttctcccattctgtaggttgtctgttcactctgatttgctgtgcagaagctaaaagacatgattttagaaaaagacatgtcaaagtcatacatgctcaacgacatagcgagtacatatgtaaataaaaaattattttatgctgtgaatttgaccgaaaataacctttacctcgtcaggaattacaatcctcacgtatggtaaaggatttccctattgcaaattattccacaacattaatgttctgtgtgctttttatctatcccaagatacaagtaaatttgacaaagatattaggtttgtaaacaaatttacgttcaaatctttgcctggaagtatctagatagaattttgcatgcaaaagagtatttacatctaaaaaattacatatttcaaattaaaatgattttagtgttatagatagaaggaaagagttattgaagtttatttctgttttggcagtgtaaatgaattacttacaaaattttagaagtctacaggtgtttttataaagtttgtgttatttgtggaaacctcagttttctggcattttgccaatgaggtctactctaagtatagcagaaatttgttttccagctttataaatatatattttaagattaagaactgattttacttatataatctgggatcaacttttggcttctcctgtcaaggattttgaatttgtgacaaaatatacacttattgataaccagtgacatatataaaatgctttacaattaataaagcatatgtattttacatattttttcactacatatgacgcatgtggcaaccccaagagttgagttgtacccatcggcaaactttgatcatgattctgtgaatataggcaagcaccaattgcaggtagaacattctttttttgagtcccaaaccgtgagaaacaaattacagaaatgtacctttcttttgcattaggacacgttgtagttttgtatgaacactctagttttaagcagtatgtgcaaaaacattgcacaaaggatttgtgtgttgattttgggactcctgtattattaattatgtggtttatttgactaccccacattttcaagcataaattaataaatccataattccaggcttattaacaataaacaatctagatagttgaactctttcttgctaacattttctagatatggactgtttggtatttttctactaataaagacccttagtaagctgccttctggtttgatgtcattgggatgtttactgggaactttggtggagatcttgcagtctctctcccccagtggtgaaagaatgagttacaaaccagctttccttcccagtgtacaatagcgatggagtttgttctatatggaaaatttgtttgataaaagtattctttaaaattttttgttccataaattatcagtattttcagtttctgattcatgcttgggatagttgctgcatattgtttaattttgtcagaatttatattgttaaatatcaaatacgacagactaccctcaaatcataagtagttaatgtaattaacatcctgtttcatcatgagactcttcagtgttacattaaaaactgctacctcctgggccgggcgtggtggctcatgcctgtaatcccagcactttgggaggctgaggtgggcgatcggatcacgaggtcaggagattgagaccatcctggctaacatggtgaaaccccgtcgctactaaaacatgcaaaaaattagccgggcttggtggcgggcgcctgtagtcccagctactcaggaggctgaggcaggagaatggcatgaacccaggaggcagatcttgcagagagctgagatcgtgccactgcactccagcctgggcgacacagcaagactccgtctcaaaacaaaaaacaaaaaacaaaaaaactgctacctccttattacaaataggaactaaagttgaagtttgaggaatttgctaagaactaagccttgaactaaggctattttatttgagtatgagtcatatcagggtacggatccattttactattaacaaaacaaatatgttctgttttttttttttaaatgcacacaccacgtttgagagattcttattcactgtattttctttaattatacttgaattttggtttacattgaggagtgccctcaaagatattaacagatttttaaaaaatcctctaaaaaactcattcttagggaaatttgttcacttactaggtgaggagcaaaataaaaatccttaatatagaagagctattatctgtcttcaaaattaagtctttgagtagatttgtgaataaatctaatagttttgctgaatttacttagatcttaagacagaataatcatgtagaaaatttaaaatgtcaggaattcataatgattcatatacccaaggattttcattgatagtgaggtaaggttattcttgagaaagactcaaagtcataaaataatagaatttcgaaactaccagaattatacaagtcaattaaaatgactgatttgttttaagaggaagaaatactaaatgtataattattagatgcagcatattgtatctgttttgttttgtgattctagctcttataacctatgcttggacctaggtgtcataacttactttaaatatgtatgtttggttttcattcatattgacagtactacctctcagttttctttcagatattgttttgtatttacccatgaagacattgttttttggactctgcaaataggacatttcaaagatgagtgaaaaaaaattggaaacaactgcacagcagcggaaatgtcctgaatggatgaatgtgcagaataaaagatgtgctgtagaagaaagaaaggtatgttgttcattgactattcttttgggtgagaaatttaatttatatttgactgtgcaaagagtcagttgttacttgtaaacttcaagtcattgtttaggtcagagttgctgttgtctaaatgcaccaggacctagttgttgaaagggtaaactggaataaactttaattgggtttacaaaatgagaattcttactgtatattttctctttttcgggttgactttaccagtttgttctagttcagataatttagacaacattaactttgttgaattttttgtttgccagccggtcttcagcattttaaggcaacattattattacagttgtaatacgaatataattaccagagaaaaaactcaggaaaataaatgcttttatgaaaatgggattagaggtttgaaaataaacttgttaggagaaataatttcacaatgggatggttttttctttgttaagttttctttatgacttcattagtttataaaacattaattgataaaacttagaactataaattgaatgcttcagtgaactttattatttcagtgaacatttgttatttgatgtgaactttgtgcctgttttgaaatttactaaactcaaggcatgtgttcggaagagtgtttttgaagatgacctccccttcttagaattcactggatccattgtgtatagttacgatgctagtgattgctctttcctgtcagaagatattaggtaagtgatttgaatttcctgattttatttgaatttggacccttagaaggtactattatggtaatgtttgtgaatatactgagttttacaggtgaggtgtgttcaatagataattatttctatgtatacactatcaccaagttttacatttcaaataaaagtcactgaattaatttgtaatctgtcagtttgttcattcataagcttttctattacttcagacagtttttttttaacttttttaatatatgtgctgctgaagcgagcacgacagttttttaactttcagtacttaagatgttatatatagagctactgaacatactgtgtttattttaccaatttagggaaaaagtgcaaaaattatttaacctttaaatgcacctttatatttcattaaaaatatcaacatagtaatattgaataatggctatgatcggctctgttgtgtgtaattagtaacagttgtagcaaatgatccttaaaaaatgttctaactaaacattagaggccaggcgcggtggctcaggcctgtaatcccagcactttgtgaggccgaggcaggtggatcacaaggtcaggagattgagaccatcccggctaacatggtgaaacaccgtctctactaaaaatacaaaaaattagccaggtgtggtggcgtgcgcctgtagtctcagctactcaggaggctgaagcaggagaatcgcttgaacctgggaggcagaggttgcggtgagccaagattgcatcactgcactccagcctgggcgacagagtgaggctccgtctcaaaaaaaaaaaatccaaaaaaacaaccccacaaacaaacaaaaaacattagaaatgtctgttagtacttttaaaggttgccttgtaaaattaggactgcaatagtgcaatctaaggctctcaaagcataaaacaagtaataaggaattcattcagatattttccgaggtggttatacctgtcttttaaaaaaaaaattttgttatatattgggttaaaaaaagcagaggtgctgggcacagtggctcatgcctataacccctacactttgggaggccaaggcaggaggattgcttgagcccaggagtttgagaccagccatagtaagacccccatctctacaaaaaaatttaaaaattagccaggtgtctgtggtcccagctactcaggaggcctaggttttgggcccgagaggttgaggctgcagtgagccttgatcacaccattgcactccagcctgggcaacagggcaaaaccctgtctcaaacagacaaacaaacaaacaaaaggcagaggtaggttaagctatttattaatggtcttctactggtatagatataagctagaaataacattcaagtgtttttacttttactacagttatctggccactttgggactcattatactgaattagtttcacagaggaggtaaaatctgttgtttatgattacatattaactctaccattttaccttcagcattgctgtagtatgtcatatctgaaggcaattagcacaagtgacttgaagaattgtagttttgatgacttatatgtattttataaaaggcaggcagagtttttgtgtttgctttcccctcctctggacactttaaatttttgctaccacaggtttccaacaatttgattatgatgtgcccttgtgtaatgtggttggtgtttatttggcttggagttcgttgaatttttttgatctgtgtgggcttatacctttaatcaaatttgaaaaatgtcttcagatcctttttcctcccatcctgttattcttttctctttctgggactcttagtacacacaagtttgattgcttgatactgtgtcacaggccactgaggctctttcctttcagtcttttcttctttcttcctttttttctttctgtgcttcattttgaatagcttgaatagttttgtttcctgtcttcaagttcacttatatttttttcttctgtagtgtctggtctgtttataccatcctgtgaatttcttttttagatactacatattttgtttatctctagaagtcccatttggttcttaatttttttttccattttggctctcattattcatgtttctttcaaaattcttgaacatatttagcatatttttaatagctgttttaatgtacttgtctgttaattccattattctagggtttttttctttctattggatgatttttctcctgattatgggttatattttcctgtttattcctacagctgttaatttttttttttttaattaggcattgtgatcttactttgtggaatgttagattttattgttttcctttaaagaaaggaactttgtcagacatctaagttacctgaagatcaactttatgttttgaagcttgttttcaagcttgatcagggaaagtctacgtttgcctttagtctaaaggtaatttagccctataataagatgtgacccttctggagtctttgtagactgcctctggtgatcaacgatctcttctctgacttttcagaacgttaatgcctcttacctttgtgtaagtccgtcctaagaatcattcagcttatggttgtttgcccagccccatagagttttagtctatgcatgcttgtcttcgtattctgcaaagaccaaaggagtcccttagggagatttctggagctcttttcctgcctagcttcctcctctccagaactctgccccgtgagttccaggtccttcagcttccagggctctgaactctgtctccccaactcagtgctctccttgggattcttctccctgttctgttgtctgcaatgggtcccaggaagaatgtggggcaactgtaaggttcacccttcatttcccttcccttagagatcatagtcctgtactgcctgttgtctagtatctgaaacagttgttttatatgttttgtccaagtttagatttgtttgtggtgggagggtgagtctggcctcccttgttatatcatgttggcctgaagcagaagctgagtttcttttattttttaaatatagtttcaatttttaacaactattaaataggcaagtatcaacaacaatagataacaatataatagatatgcatattcctcccactttatcaaatcttaattttcttcaatttttttttttttttttaatagggtctcactctgttgctcgtgctggagtgacagtggtgtgatcttggttcgctgcaacctccgcctcttgggctcaagtgatcctcctgcctcagcctcctgagtagctgggactacaggcatgcaccatcatgcccagataatttatatatatatttttttatagagatggggtttttgccatgttgcccaggcggtctcaaattcctggactcaagcaatctgcctgccttggccccccaaagtgctgggattacaggcgtgaaccactgcgcctggcctgttttcttcagttctttattaagaaatgaaacagtaaaatacagctgaagccccgtgtttgttctttctgattctccctctgtgcccctctgagataacttctatgagttttgtgcatttttttttctttttaataaaaacagggtcttgctctgttatccaggctggagtgcggtggcgagatcatactcaatgcagcctcaaccttatgggctcgagtgatcctttcgcctcagcctctcaagtagctacaactactggtgtgtgctgccatgcctggctaattttttatttatagtttttaaagacagggtctcactatgttgcccaggctagttttgaactcctggcttctagtgatcctcctgccttggtctcttacttaaagcactgggattacaggtgtgagccactggctgctcacatgttttttataatagtacttaataattttatgtctgaaaatattatataatgttattttgcccatttaaaaactttaaaaaatgctaacaaactgtgtactctgtaacttgtcttttttactcaacactacgtttttgagaatttttcttgttgatctgtgtagttccattttaactgttatatcttactatgtttcattatgcaacagttggttcaatccattctcttgttaatggaaatttagtttgtttctaatttttgccagtaggaacagtgttgcaatgcatattcttaaacatgtctgtacacatctgagggtttcatttatttgtgacaaaacttgccaggtcatagtgtttatgcaccttcaactagatattgtcgttgtcaaagtttttttccaaaaggattttaccaatttatacatgaaccaccgatagatatcctcttaacacgtggtattctgaaacttaatttttaccaatcagatagatgtgaaatcacgtagacttagtttgcatttctttgacttctagtgagaagtagtgtcttcacatattttttggatttttaaaatttattttttatttttgtttttcttagagacagggtcttgaacttttacccaggctgaagtgcagtgatgcgatcatagctcacgctaacctcgaactcctggactcaagtgatcctcctgcctcagcttcctgagtagctgggactacaggtgtgtgccaccaagcccagctaatttttaatttttttttttgtagagacatgctgtgttgcacaggttggtcttaaactcctagtctcaagcagtcctcctgccttgactttccaaagtgctgggattacaggggtaaaccaccatacctggccatatcttttggatttattggtcatttggattttcttttgggaattacctgttcatatttttctccatttttctgctgaataatttgtcttttcttacttatttttcaagaaattttacatattttctggctgttcattgtcagttgtatgtgctccagataacttgaacagtctgtggttgccttttaatttttgaattatgtctttagttatgcagaagtttaaaattttaacataaattaatttacactatttttctcactttagcatgagtctatcagatggggatgtggtgggatttgacatggagtggccaccattatacaatagagggaaacttggcaaagttgcactaattcagttgtgtgtttctgagagcaaatgttacttgttccacgtttcttccatgtcaggttggtatctctacatttcatttttatatggctgataattgtaatatgtcaactttatccctataaaattaagttcttttattagctggccgttctctcattatctcaaatttatttaagtatttatgttctacctgattcactcacattccttgttttatttaattttcacaacatacctgtgaggcattgacattttttctgttttagagaagagaaaactgaaattttaagaggctaaatgaccaggatatgtactgctattgctagcaggagtggcattcaaactgattattttttcttgtcatttatcaatcaggactgtttgctttagttaagaaatactcaaggtcaatgtgtttctgaatttaaaattactgttaaatacaaatttacacataaacatggtatgtataagaagtaggacataaatccatcatacttgacagaacttatggaaataacaagaaaatgttacagtttttccccagggattaaaaatgttgcttgaaaataaagcagttaaaaaggcaggtgtaggaattgaaggagatcagtggaaacttctacgtgactttgatatcaaattgaagaattttgtggagttgacagatgttgccaataaaaaggtaaaagcaatatatatataattttcatgatgaagattattttgtgttacacagaatgtactttctatctgaatgttagatttttttttgaaaaagcttgttatataatgtttttgtagcaataaaaaagttccaagtgaatgttctttaatgaaaacctttatttatttatttatttttaacttttgtttcaagatcggggtacatgtgcatgtttgttacacaggtaaacttgtgtcatgggggtttatcatacagattattttatcacccgggtattaagcctggtacccattagttatttttcctgattttcttcctccctcctcccaccctccacctcccacagtgtgtgttgttcccctctgtgtgtccatgttttcttatcatttagctcccacttataagtgagaacatatggtatttggttttctgttcctgcgttagtttgctaaggataatggcctccagtgccatccatgtccctgcaaaggacatgatcttatttattttttttatggctgcatagtattccatggtgtatatgtaccacattttttttaatgcagtctatcattgatgggcatttaggctgattccatgtctttgctattgttaaatagtgctgcagtgaacatatgcgtgcatgtgtctttgtaacagaatgatttatattccttttggtatatacccagtaatgggattgctggggcaaatggtatttctttctttaggtctttgaggaattgctacacagttttccacaatggaaagcctttagttctaatccatgtcttggcatagagtttcttttctttttttttttttttttgaggtggagtttcgctcttgttgcccaggctggagtggaatggtgtgatctcagctcactgcaacctccacctcctgggtttaagtggttctcctgcctcaggctcctgagtagctggggttacaggcatgcaccaccatgcctagctaattttgtatttttagtagagacggggtttctccatcttggtcaggctgatctcgaactcctgacctcagataatctgcctgcctcggcctcccaaagtgctgagattgcaggcgtgagccaccgcacctggccggcagacagtttctttttttctttttgagacagagtcttgctctgtcgcccaggctggagtgcagtggtgcaatcttggctcactgaaacctctgcctcctgggttcaagcgattctcctgcctcagcctcccgagtagctggcactacaggcgtgccaccacacccagctaattttttgtattttttttagtagagacgaggtttcaccgtgttagccaggatggtcttgatctcctgacctcatgatccacctgcctcggtctcccaaagtgctgggattacatacagtttctttaagcaagccttctcttttccttcctcccagttcttggtactctttcactttcatatatttgcaaatgtaaaattgtgttttaggtgtatatttttaatccatgtataccagtaacttaaaaaaaaatttttttttttttaagggagagcataatggagctcttgtgatacggtgctcttagtggaagtttggctatcaattccatcacctgtatttcacatattttattaatgaagttcttaaattaaattctcatatttagccaagtattcatttggctgggaggtagaaagcctactaaccaactttttttcatgaacaatatttttaaagtccaagatttttaatacctacattagggaaattctagaattaaattcttacaatgtggactgcatatgaggcttttagtgacagggaatttgttgaaggctatctgtgggttgtattttggtataacatttcctaattttatttgtggtatgttcatttgatatcatttggtaatacctgaaaacaggaactgattttactgtgttgctttttcatcatttctagctgaaatgcacagagacctggagccttaacagtctggttaaacacctcttaggtaaacagctcctgaaagacaagtctatccgctgtagcaattggagtaaatttcctctcactgaggaccagaaactgtatgcagccactgatgcttatgtacgtgcttaaagatctttagaaattgtgatgtgttttaaaaacattattataaatgactttagaaaaattttattatagtagtggcagaaactctaccaaaatattttatatcaatttggcattgaaaaatgcttaggaagacatttagtgaaactattcattttcgatattaattagcaagtaccaatcaacagattgttcaatgctagtttattttcattgtcatgaagccaaattaatgtctaatttgtatgttaaaaaatgtgaacttgctgaaaacatgaaaggctaataaatccaggctgagcaagcataaatagtactgatgatggatttgatatataaacaattcagaatgaaaataattatagtacagtttctattttaaaactggccttatttcttatatataaaatgtggtgaaattttagaaaaattgcctccaaatttagcttgttgctgccattagatatatttttatatttacatgtttgtatgtagtgaaatctgggcttatctttatatatagcactattgtgtgttttttaagaaatgtattttattccacagtgaatttgttttctcctaactcatgctttcatttgtagatgaatattttattgtttctcctttgcatctatcaaaggaatggaaactcctttgaattgtaaccagcaaacaattcacttttgttagggaaattggatgataattttcctttaaaagataccgccaaacttgagactaacattctcagctgatttaagtaggatttctcttactagattgcattttgttagattccattttaagttattttatttggatattgtgtgtaatattgagtgtgaaaaagtgaaaacaaacttttaaggctcaggcacctttctcaattttcacaattggtatgattattaaatgaggacatattgatatttgtgtcacataataggttgaattccatgtttgggtgctttgtgaatcattctcttcgatttttctgaagatgggacttactgttttatttcggtgatctttagcatactttttaaatttttctgtttttttataggctggttttattatttaccgaaatttagagattttggatgatactgtgcaaaggtttgctataaataaaggtatgttaagatccataaataaaatgtgaattcactcttttgtgaggtttatctccaaaaaaggcaatattcacatatttgcaaagcatttagtactataacttcttgaatgtctgagcagtcctgacattagggtgggatccatcagggcccaagatgagtgtttcatctttgttacttgtggcaaagcagcccttacttcttttactttgtagcattgctatgtatttggcttctagagttggggctttgtggctttcttattgcagtgacacaaccagctttctcctagtctggagattatacatccttgctataagtatttaaaatgctttctatataatgctttaaaacatgtaagatggcttatccccaagatggtagctaataaacactaagtgataaagtaggtaaagatctatttattcatttattaaatattgttggtcattttacagtgctttctaacatactgatttacatttctaattttcttctgtcatttttctccaaaaataatggtcatgtcatccaacctcagtgctgtttttagaggtcttgataagccagtgagagcagaaggagccacgtagtagagtgggtgagcccaggctttttgttgcacagaccaatgtgaatcccagccatgtgacctgggatgtacctgtttctccaaacatggaatgtagatactagcataatgtccgttttaccgttttatagaataattgtgaagacttaaagggacaaactattcgaagcatctgtattgatataaagttatcactattctcgtagcttccttttggagattttaaatgattgtgtttgttaagatgttaattaaattaggccattttgctaaatgctcttaaaaatatggcatgactgcctcatataaaatgatatgatattctttataattgtcgttgagcctctgtgggtggcaggccctcctttatatgttaaggtagaagagtctttattcttacttctcctccctggagagccacttcctatgaatgcctgctggttctctgtagtcagaggtcttgtggctgtaacttagagtcagtctccatatccctgggttctgcatctgtggattcaaccaaccacagattgagaacattcaagccaaaaaaaaaaattcacagttttaaaaaaggaaaagttgaatttcttgcatggagtaccacattgaatctatatgaatgaagtgatgcgtaggcattttataaggtattataagaaatccggagatgatttaaagtatacaggacaatgtgtatagattatatgcaaatattgcagcattttatataagagacttgatcatctatggatttgatatcagtgggagggaggttcctggaaccaatccctcaaggatacagaggaatgactgtatgttaattaactgaggcaggtgatcggttttttaagctgattagggaaacagtatataagaacttacttaactcataataaaactaaaattcaacaggggagagttatgattttttggctttatggttgtggaattgcatgtaggttacatgtacaattttgttacatgtgcaattttgatgaaaatgcttccaaggaatgtttatgatatttttcactaaagtaacatatattaataacacagtactggaagtcctggtatctgtgtacttgtcattgtaatgctacattatttgaccttcactttttttcccctttattacattatatgtgtgagtatattgtgacatcttgactcagattccagtgaattgtattaggttggtgcaaaaataattgtggttttggtaatttttaatggcaaaaaccacaattacttttgcaccaacctaataactaagattaccatctttttttccttccttcctcccttccttcctttctgttattcagccagaagtatcagcatcactgttctcttattttcttcatgtacatatggatgatattttcgaatgaccacttttctcttttgctttttattattagactgtttttttcttcttgttaaaggataaaaagattagaacataaaaggatatttacacattgtttccccattgacttattcccaagatggtagctaaaaacaccaaatgatatagtagttaaagatacattgactcatttattaaatattgttgagcattttacgatatgggaataccgtagtgaacaagccaggcatactctgtttcctgaggggcctacagttttattggggatatagatgagtgaagaaagcaattgcagtgtagggagatgagtcttatgtcatgggaaaacaaggtgctgtagttgacacaccgagaggcatctgacacattgggggaaatattctagaatatttcctggagaaagtgcaggtaaaagccagacctgaaacctgagcaagagttagctaaggccaggtgcagtggctcacgcctgtaatcctagcactttgggaggccgaggtgggtggatcacctgaggtcaggagtttgagaccagcctggccaaaatggtgaaacaccatctctactaaaaatacaaaaaattagctgagtgtggtgacgggcacctgtaatcccagcttcttgggaggctgaggcaggagaatcgctttaatctgggaggtggaggttgtagtgagctgagattgcaccattgcactccagcctgcacaagagcgagactctgtctcagaaaaaaaaaaaaaaaaaagttagctagctgaagagtataggaaagaatgggtacaggaaattacaggtgccaagttacagaggtgagagaaattatggtatctataggtaattgaaagtaattcagtatagtgaacattgaatagggctgggcggatgaaggcaaagcagaaaaaggaaagcagatgggccatggtaaggagtttatatctcctcccaagagcaatcgaagtgactgagagttttaaacacagcagtgaagtgaattacattaaaaaaataagaacttgggctctagaataaaaaacggatataggaggaaggcaggagtcacagtaggaatatcttttgggaggctgtgacaataatccaagtgagaagtaatggcaacttgagtcggttaattgtgttgagaatggagagaagttgacaggttcaaaattcatttttcttctttttttgagtctcactctgtcacccaggctggagtgcagtgatgcgatcttggcttaccgcagcttccacctcctgggttcaagtgattatcctgcctcagcctcctgagtaactgggattacaggtgcctgccaccacgcccagctaatttttgtgtgtttagtggagatgtggtttcgccatgttggccaggctggtctcgaactcctggtctcaagtcttccgcccacctcagcctcccaaagtgctagaattataggcatgagctaccacacctgacctcaaaatacatttaatagagcaagcatgagccactatgcccagcctcaaaatacatttaataaaccaatggaatttgaggtaatgatgaaagacacatgtcaaggatcattcctgtgttgttggcataagcaacagggatgaaaagcattgaggaagagcaagattttgggatgcgttgtcacacagttgattttaggtatgttaagggagggagacctgtaagacagcaaagtggaggtggtgcaagaattagttgtgttggctgtagcacagaggacagtttgagttaagagagttgggactgagaatcccgaggaactcttagtgttgaacatttgcgtggaggaggggacaccaaaggagttgccatagacatcgaggaaattaggaggtgtggtgtgcagaaagccaagtgaagaacatgttttaagtaggaggatgctatcaactgttttaaattctgctgagagtttgagaaactgaggacttagaattcatcattagatttggcaatgcgccaatcatttgtaatcttttaaacaatagttttgctgtactgggtagcaaaagagtgatttgaggagtggtcatttggagcatatgctattcaaacagagaagagtccacgggctttggtaacatgaaggtcctataaccatagcaagagaatgaggtgggtggaagtcatattaacgtgaatagaggagtaggttagatctgaggaatgtgggaacagagacagggtctcattatgttgcccagcctggctcagactcgtggcctcaagcgatcctcctgcctcagcctcctgaatacctcgggtttcaggcctctgcatctggcttgaaaacaacattttctcagaagcttgttttagttgttttagaaataacgaaggcatgtgtaaacaactgttctagaagcttagtttggaaagggaacgtttattgatgcatataacacttatatgttgggtgcttatgtgtcaggcactgttagagttgctcgggaaaatttacaaaccaagcaaaccatgccccttcatttcctttgggtgaagtgagggagccatgtggttatctgaaggaagagcttagcaggattagagggaagaaagtgcaaagcctcctagggtgattggctggctcttttggaggaacagtacctataactgaatgaaatgagtgagggtaagagtggcaggaaatgaggctagaaaaggagcttgggccatatcacgtagggcctcgtaggctgtgaatctgacttcatttcttattaatgaaaataaatacgatgatgggtgatgggaaacccatagaggatttggagcagaagaatgatataattaaaattttattttagaaatatttttctggttgtcgtaagaggaaaaatatttagccccagggcattttggcagagagttaggaggctattgtaacagcccaagcaatagacaataattgtttggattaggcgggtagcaatagaggtgatgagaagtcgtagcttctgtaggtatttggaagatatatattgtgaaggatttgctgatgaattccctgtaaggggtgagatgtaaagattcatagaacattaagatattttggtcagatcatctgatcaatggaaaggtcagttatagtggacagattatgagaagaacaggtttgggtgagaaaactttagatttcagtgttggatatcctaagttttagatgattattgatatccaagagatatcaatatttgggatcaatttgggaaatatgatcccaaagttcaaggttgaggttggagatgtaattcagatccgatggtagttaaagcagtgagactgaatgagataaaatagggagtgaatgaaataaagagtaggtgtgatattgacctcaagggcacaccagcatttagaggttgggaagatgaggagagagcagcaaagaggactgggagggccactaatgaaggagggaagtacaggaggtgtttagttctgaagccacctgaagaaaatgtttggaataggaagaagttgtcagttgctttaaatcattcggggaggttgagtgagatgagagtctagaactaacagttaggtttgatggtgtggaggccatcagtaaccttttctttcttttttttttttgagacagagtcttgctcagtcacccaggctggagtgcagtggcgcgatctctgctcactgcaagctccgcctcccaggttcacactattctcctgcctcagcctccggagtagctgggactacgggtgcccgccaccatgcccggctaatttttttttttttttgtatttttagtagagacggggtttcaccatgttagccaggttggtctcgatctcctgacctcgtgatccacccgcctcggcctcccaaagtgctgggattacaggtgtgagccaccgcgcccggcccaagagtaaccttttcaaaagcagctttgctctactgatttgggtaaaagcttagttgcagttggtttgggaggaaatgggagcagaaaatttgagagagtgagtgtagacaactctttcaaggaatttcgctataaatgggagtagagatctgaagactgaataattagcaaactgaaaagtgggaagacgtaattctcttattatttcatttttcttagtgaaataagaggtgaagttctctgagtaataggagggtcaaacaggtgttagaagttcacaaagaaaggaagaggtttgaaatagtcattttgagagtgggaaatgtagaagaattaacagtcattgctgagggtgcgtttgaaatctgtcatgagtttaaaataacttgtgtcatcatcgatgtgtttattttcaactatattcaactgcttgggtgtaggcatcaggtaggtaaaaaaagtgggttttattatgagtagaggttttgccacgtaattaccatggagggagggaagagcaaaggagttgagagtatagatacaaaggaatgattactgtaatgtgggtaagagaggaatggaaggctcagtgggcagtgggagtagggatgttgataggtaaggaaaaggtgataggatcaatgcatttggttctgcaagtgtcaaagtattgttggggaaagcatgctggaaggaaagatagggatgctggtgttctcagggtggaaggcttacagttgtagtctggaagtggtgattttattggcaattataaggtcaacggtatgactatggaattgagtggctaaggtctgttgaagaaaagattgtcggaaatgcaggggtcaaggaactggcctgtggatgttgaactcactggcagtgatcaaggaatagtagtggagtgaaagtagttaatgaatcaggcactaagatctccaagggatgaaaggatgcagtttggagatgacaagataactgtagtaatcaggaatagcaggttttgtagctctgtctcataggcctcagaggagatgggcttttgaaggacaagagaaatgatgatgaataaattctaagcaggggaagtgtttgggaaagcagggcaggctttgtgctgttgatggcaaatgatgtaccagacaggatgaagttgagaatttggaagttgatcactgattagaaaggcttacattttattttggccgggggtggcagctcatgcctgtaatcccagcactttgggaggccaaggtgggcggatcccttaggccagaagttggagaccagcctggccaccattgcgaaacactgtctctactagaaatacaaaaaaaaaaaaaattagctggtcgtggtggcacatgcctgtagtcccagctactccgggggctagggaatgagaatagcttgaagccgggaggtggaggttgcagtgagccgagattgcgccactgcattccagcctgggtgacagagtgagactctgtctcaaaaaaaaaaaaaaggaagggcttacattttattttggtgctgactgggaatgaaggcaatgagggatgactgttggagaaggctgtgcttactaaacagtattattaagtagcagcatacatggtgttatactgacttctgattttgcaatagtacagacaggttcagattctcatttccaccttctccttctgcctaggtgaataactgctgggttatagtacagatgactgcagatcatttggaatttactttaaatgtaaacagtaaaaatttgaaagagagggaaagtgattgaggcaatttggggattgaataagaaggtctttttgttggaattcatttaaggaaagaaaatgaaaatttgatccctaatattatttaatgaagtggctaaatgaatatctctgctttgtggtttgaaaattaatattgattttttttccccctagaggaagaaatcctacttagcgacatgaacaaacagttgacttcaatctctgaggaagtgatggatctggctaagcatcttcctcatgctttcagtaaattggaaaacccacggaggttaaatattaccttttttttttttaacttaaatcaattctgtttatttttttatcacattttcctatatgtgaagaatactattcattaaggctgactcatagaaatttgcttgaatacacacacacagactgatgcataaatttgagaaatatctttccagttgttgaatagtgaatccaaaggtttaagccttttctgtctgctttgtaggatgttttatgaaacaaaggaatagaaattgtattcatattatacattttgaaattatatctatattatattttttgtcaaagcaaaataaattatacattaaggaaaatatttaagattcaaagttgtcattttctttctgttaatgagtatctttgatttaataacatttatagtttggtcacttgaaatctatagtgaccaaaagcaatgtcatatttagtagcctcatttctgttactatctgattattacttaagaattctacttaattaatagattattagaacaaaaggcattccaattttagagattcttttatggttaaagcactaggtaacttaaaaaatttggatcaaatgttatacagattaatagaccttggaatacaggggctatgtctttttggaatcagaccttgtcctggccttaattgcaggatgacttccttattaaatctctaaaagcaggaatgctctggaacaatgaacaattagaatgtggtaatgtaattttgggccaaaaaatactttgtagaaatgtgattctcttacttggaatagaaagaattctgactcgaaaaagtgcagttaatgtatgcttttctgggtaagatttgtgatagattttgattgagatttaaaaccatgatatataaatttagcttttttgtcaaagtaatttgccaccctagaatttgtgttggtaatttttaatgcaacttggacaatttctgaaagatgtaactttcttttttttgagacgagtctcgctttgttgcccaggctggagtgcagtgacatgatctcaggtcactgcaagctccgcctcccgggttcacaccattatcctgcctcagcctcccgagtagctgggactaccggcgcccgccaccccacctggctaattttttttttatttttagtagagacggggtttcaccgtgttagccaggatcgtctcgatctccggacctcgtgatctgcccgcctcagcctcccaaagtgctgggattacaggcgttagccaccgcgcccagcctgaaagatgaactttaaaatggggaaggatactagtaaagccatttcttactcatgtatacatttttccctccatgaaattagagcagccaccttttacatgacttttacatgcatttcagatttttgtactagcaattaaaatatctactggatgtaaatcacatgtgcttaatgctttgcttcataatatctgttgaagtcaattaaaatatagagacagatctttaaattgaacatgttttatttgggaagcaagaattaaatttgaggcatatacacagactgggtgtccttggtatctctgaagaacaaagagaagtttggaggttatagaaaaaggaaaatgtgacattgtttttccagaaagttctttggcactagtaaattttggggagttggaagctctgatgggttagtgactgtggtgggtaaaactagtcttagagtcacaacaggttgtttcagtatctattagataaaacaggttttaggttacaataggcagtttcagcagctaggcttgcagaaaattacattcttagagtaatgttatgtgccttgagtgcttttttccccttggcccttgactctgatttagttgggtatgacaagaattatcaatttatataattactttttacatattgaagctgaataggttttcttaaaacttggaaatgggaaatactgggtcttgtgaagttttagtgtgaaaacgataactagtctcttatttcatgctctttgtaacaagtctacagtaatacctaatgtatctagatgacacctcagaaccaggagggaacaaaaaagacctctgagcagtcaaaataatgctataagcatgtattccagcttactttcggcatttctgtggagtgcaggaggccacattttgttcatagatccagtttgacaagcttgggtactgagttaaagtgaaaatggtgtaaataagtaatcatattcacatgacagtaggtggaagtgacagctgacaatctgaaagagtggacaaaactataaaaattagaactaagaactcttaaaatagaacggtttgaagtttgttacagaagggagcagctttatgcttcagtggactctgaaggtattggcagtgtatagtactgcttagtcattgatttaaattcggtatatatctcttctattgctgtcatgtacttgacattctgctgggtgctaaggctgtctgcaggctactaatatgcataataacaatcctgaaaaagaaggaaaagtatactgtgccttactgaagaaggcaggacagccgttggtatttgttagagtaaatattagttatcttacataaagcatgttatattccctgatgtcagggcctgataaatgagcccttacactcttgatagtcaatctgtgccactgttgctgtgtttgtatgttacaccatttcctgtccatgtaacagttaaactgtatcacatatctgttcctactaaactatttgcatataattttaacatttgagtggctgtatataaagctaaaagttctttataagatttatagcatcttagaatgtttaaattagataacattagtgtgcttttagtttttgaatttaattttgctcttgattttgtttgtgttaatgtagactttgtctacgtaagcttgagcccaactttggagtggtgttttcagtgatggaagtaactggaaataactcatgaaaccacttagtacttttgatagtttattcccatgaaggatcaaatttttacttgagtcattaatataaaaatttaaaagacatgtcagattttattaagcatggattttaaatatataaatattagaagacctaaacaaaatcgctaatgaaagagtaaaacatgtccctgcctatcatactcccttcactttcactgatttctgcttttatgaagtactttaataagctctacaacaaataaacaagacattgtgcctcattttacactctagcagtggttttccattccaactaactagattgggtttataatatagtcatttaaacttacttagttaaaatgttatacattagcaactgcaattaaggagctaagaaattcagctcgtatttatttatatgcatcttatccatagtttctcacttgttatatttgcctactgatggcaaattgattttttctgttccaaaaatgtagtgttttgagatttttggagatgcaaaacagcatcattttcaaattagatcacaaacaatcttacttgttgcagttgagactagtaattgatcagtgaggtgaaaaaattaggcaaaacggtatcatcaaaattttctttctttttttttttgaaacagagtattgctcttgtcgcccaggctggagtgcaatggcacgatctcagctcagctcactggggcccctacctacgggattcaagggattctcctgcctcagcctcctgagtagctgagattacaggcgcatgccaccaagcccagctaatttttgtatttttagtagagacagggttttgccatgttggccaggctggtctggaacttcagacctcaagtgattcacctgcctcagcctcccaaagtgctgggattacaggcatgaaccaccgtgcccgccccaaattttcttttaacttaaagtgttaatgtttgtttgttcccaatatttttatatatgtcaaggctttttcattatatacaggccagctctttggagttctgcatagtgtttcttgtttaaaccacacctataatgtaccatctacaatttccaattctttaagacagagtgaaaaattaagacacctgaagcaatctgagtgcggagtcctaggcattatgattttccttgacacttttagggttcttttatcacagtttatcaaacacctttttttttttaacaaaaaacaaatttacaaaatctttccatgtattcaacttagaatttaatgaaatagggtttttttttttttggtggtcatgtatcatcaactttctttacatttaattaaattaatcaacaaaaaacatatagttgacataaacaaatttgggaccaagcactactgactcttagtaaacatacaagtcaactgttggtgcagaagtgccttgatgctagagagtagcctgcaagctgtaattatatatgggcattagggaatgaagaacagccttaatactattgatcttttaagtgaaggtcagcttagaaagcttttacttgttaaaaagcttcacagtttgtccttgtagttaatgcaattgaagttgaattaatctttcttaattttttttttagggtttctatcttactaaaggatatttcagaaaatctatattcactgaggaggatgataattgggtctactaacattgagactgaactgaggcccagcaataatttaaacttattatcctttgaagattcaactactgggggagtacaacagaaacaaattagagaacatgaagttttaattcacgttgaagatgaaacatgggacccaacacttgatcatttagctaaacatgatggagaagatgtacttggaaataaagtggaacgaaaagaagatggatttgaagatggagtagaagacaacaaattgaaagagaatatggaaagagcttgtttgatgtcgttagatattacagaacatgaactccaaattttggaacagcagtctcaggaagaatatcttagtgatattgcttataaatctactgaggtactaaataaagaggaagcacatttttagttattagtaggttctggcagactttattcccgtaaagagacagatagtaaatattttaggctttgtgggacatacagtctctgttgcagtaactcagttctgttattgtagtgtgaaagcagccacagacaaatgtaaacaaatgtgcctgtctttcaataaaactttatctacaaatacagatagtgggccacatttggcttgcgagctgtagtttgctgttcctgacttagtatgatatgcagcattgtgtagtggaaagattttatagtatcaacagacatttgtaggagtttgctattttataatttcgtatgcttttttcataatagatgtctctgctttttgtggattctcttcatatctactagtgtttactcttctgactttgatttttgggggtgtattttatttctttatacagaatttttttcttttttctttctttttttgagacaaggttttgctgtgtcaccccagctggagtgcagtggtgggatcttggccccctgcggtcttcaactcctgggcttaagcgatcctgtcacctcagcctccctagtagctgggaccacaggcctgcaccactacactcagctaatttttgtattttttgtagagatggggtttcgctctgttgcccagactggtctccaactcctggactcaagtgatccacctgccttggcctcccaaagtgttggaattataggtgtgagtcactgtgcctggcccagaatttctttacttgctcatgtgagagagtttctaataaactcctgatgcttttgcttgacactatagttttactgtcatctcagagtcagattttttccttaatttcttcattaaattgatttcttaatttctcatttgttttgcattagtttacaaaattacttaagatgcctatattctctgaaattttatattttatttcacgataaataagtttaaaaaattagatttgaccatttaattagagttatttccccatcatttttctaatggcaacaataattttagcatttgagcaattctctgtattttggtaactattagtaatcacttttatcagtataaacatgcatttcattttaaaatggttttcaaaatattctcataccaaccattcataaaagatgttccccttctgggaaatatcagtttttgctaacatctgcatttccctttgattttctaggaatttcttattaggtatacactttaagtgatatgtttcatataatattataggattatcaggatttcatgattttttttttttgagatggaatctatctctgtcgcccaagctggagtgccgtggcgcagtcttggctcactacaacctctgcctccccggttcaagtgattctcctacctcagcctcccgagtcactgggattacaggtgcccgccaccacacccggctaatttttgtatttttagtagagaaagtgctgggattacaggtgtgagccactgcacctggccttggatttcgtgatttgactgacatcttttacaccaattattgccatttttttattgggtactaattattagtattgctttctttattcgttaaataagaagtaaaagaacttttaaaaaataaaataactttttttcctagtacaaagcttattttcaattttttttattgcttaaattttgcaggttaattaaggctgtacttctttttcctacttcctgtttaaatatttggcattttttgagggttttctttctatggatttttgtgggggatcccatctcgttggacacttggttcctggagattgccaaattattgaaaagtttcctcatacccaaacattggcaatagactgaataaataacatctctgacattatttttcaattatatagagaatgctttttgtaaaatactgatttatttaaagatattacaatcatagtagttttttgcaatcttttttaaatcagtggatgtcaaggaacaactattgttctttgtacggcatttttcaacattgtgaagagttcttatactcaaaaagtttgggagacacagtgtgacattgtttaacctgagttgaacttgtcattttgtattcttgtttagagcagggattttattttgtctctttatctaactttgtattcctaactatttctttctttctctttggttctttgtttctttgttcattcttctctctctcccttttttatctatcatataaatatgtaaatatatattatatatccattagggaagaggaagttgtctaaagatatctagtatataggagctttgttctgcagaaaagaggatatgaagtcaattatattggaaattaatgcttaatactttttttaaagcatttatctcccaatgataatgaaaacgatacgtcctatgtaattgagagtgatgaagatttagaaatggagatgcttaaggtatgtttacaattataaaaatattacttcaagttctttccaaaggacatttaattaagtaaaatattaactaattctaaactaggttctaccacaatgaaattgctactaattatgtaacattagatttcacattttccaattcatgtttctttcatgtagtctataaataatgggttagaggtaatttactaattttaaatgtgctttccttgttccttcttattttttattttgaagacagggtctcactctatcacccaggctggagtgcagttgctccatctcggctcactgcaaccttcacctcctgggctcaagtgatcctcctgcataagcctcccgagtagctgggattatgggcgtgcaccaccatgcccggctaatttttatagttttagtagagacagggtctcaccatgttgtccttgctggtctcgaactctttacctcaagtaatccacccgccttggcctcccaaagtgctgggattacaggtgtgagccaccacacctggccttggatttcatgatttgactgacatcttttacacaaattattgccatttttttattgggtaccaattattagtattgttttctttattcgttaaataagaagtaaaataacttttttttaaaaaaagaacttttttcctagtaaaaagcttattttcaatttttttattgcttaaattttgcaggttaattaaggctgtgcttccttttcctactttctgtttaaatgtttggcattttttgagggttttctttctatggatttttgtgggggatcccatcttgttggacacttggttcctggagattgccaaattattgaaaagtttcctcatacccaaacattggcagtagactgaataaataacatctctgacactatttttcaattatatagagaatgctatttgtaaaatactgatttatttaaagatattacagtcagtagttttttgcaatctttttaaaatcagtggatgtcaaaaacagctattgttctttgtacagcatttttcaacattgtgaagagttcttatactcaaaaagtttgggagacacagtttgatattgtttaacctgagttgaacttgtcattttgtattcttgtttagagcagggattttattttgtctctttatctaactttgtattcctatttctttctttctctttggttctttgtttctttgttcattcttctctctctcccttttttatctatcatataaatatgtaaatatatattatatatccattagggaagaggaagctgtctaaagatatctagtatataggagctttgttctgcagaaaagaggatatgaagtcaattatattggaaattaatgcttaatacttttttttaaagcatttatctcccaatgataatgaaaacgatacgtcctatgtaattgagagtgatgaagatttagaaatggagatgcttaaggtatgtttacaattataaaaacattacttcaagttctttccaaaggacatttaattaagtaaaatattaactaattctaaaccaggttccaccacaatgaaattgctactaattatgtaacattagatttcacattttccaattcatgtttcttttatgtagtctatgaataatgggttagaggtaatatactaattttaattgtgctttctttgttccttcttttttttttttttattttgagacagggtctcactctgtcacccaggctggggtgtagtggtgccatcttggctcactgcaaccttcacctccagggctgaagtgattctcctgcatgagcctcctgagtagctgggattacaggcgtgtgccaccatacccggcttatttttgtattttttgtagagatggggtttcaccatgttgcccaggatggtcttaaactcctgggctcaagtgatctactggcctcagcctcccagcgtgctggggattgcaggtgtgagccgccgcatccagccctgtgttccttcttgtgttactttcttgtaattttttcctggaatatgggtagtgatttggctctccagtattgaaattgagtttcctttcttccaattcatgtgtatccatttttatttggaagttttgtttttatacattcaataatcatctttactttctttggtattatttactatggatattttatattatataattttcaaatggattaaatggttcagttttactcttattattgagattgaaaatactagtttataatttatatattttctattcctttacctctaatttctttgtcaggtgttactaaccaaagatgtataataagaaaagccaatgtagctaaattaagtaaaaaatgaagaaaaacacagaagttccccattatgcatttttttattcctaatctttaggttgatgagatttttttatttttatgaaatgagattaatttattgacttttttagttttgaggccaagtaatgagtagtgagtaagaatgtatattctagggccaggcatggtggctcactcatgtaatctcagcactttgggaggccgaggcaggaggatcacttcattccaggagtttgagaccaacctgggcaacatggcaaaaccctctctctccagaaaaatacaagaattggctgggtgtggtggcatgtgcctttagtcccagctacttgggaggctgaggtgggaggatcacctggggagcctggggaggttgaggctgcagttagccatgaccatgccactgcactctagcctgggtgacagagtgagaccctgtctcaattaaaaaattaaaaaaaaaaaagtagattgtgaattcagatgtaggtttgtatcccagcttttccagttagtatctgtgtgactttggggaagtttcttagcatctttgatactcggttaacagttgtaattattatttaaggtattgcttgagaagagcttagtatagagcctgacatttagtaagtgtttaatacatattagctaacagtaaaactagaacataaatactgaattgtattttgttattaattatccatttctctgagaagtactgttccaatagtacatttataggaaacttgtggacgtctacaaacgtatacattaaatctcttagaaggcaacctggatgcccatattagagaactctattttaaacatgcattctaagtatgtttgtggacttgaataaaataaaacaaacagaaacacttctttcttctgccttcaggcttgaaatgaacatacttttttttaaaaaaaaaccttcaaaatgaaaatattaaataaaagatttaataaaaagagaaagtaaaaactgtagtttaataaagtcttcctgtctcttcatagttaaaaaatgttatagatgaaacaattttgaaatattcttgaaatagataatctttatttaggggagaatgtcagatactgtcaagccaaaataaaaacaaataactttatttcatgtttgtaaaattccttttctaaaatgatttgaatcttttgttgttttgacaattccaaaacacatttattgtttgctcatagtttcagccttattcagaaagaatgcgactgacacatgatatagagaaacttgttccaaaaataacattaaaatccacgtttactacttgagaatcgaaaatattgaggtgcaataaagaataaaatgttttaaattatccaaatttaaaatttatgatagctttccccaggggcagtttattatatgctattaatgagccttgtttatgctggaaatgttccatctttggccttgcgccttagaaaccattcatgagcacatatttaaaccggagcacacatgttcttttgtagtatggcttgcacatctgccagctttcgacaaaattgtaggccctgttaataatagtccttttgtgtttggtgaaaaagatacgacactgtcagtggttttgcttttaagatttcttttaaactttcagtctttagaaaacctcaatagtggcacggtagaaccaactcattctaaatgcttaaaaatggaaagaaatctgggtcttcctactaaagaagaagaagaagatgatgaaaatgaagctaatgaaggggaagaagatgatgataagggtaagcactgaagtatgtttgaaatgactcacctgtgatacctaccactgactttaacttaggatccagttttggatggtttggaggtcagggactttgtggcatatagttaattattggatccttataagcttttgtctccttagtgcttttgtctccataaagcacaatcttactacttagaaaaatagagtaatagcattatgatgataaaaatatctttccctttgtttttttgtatttctccaaatcattatagctctcatttagaattattaaagctgagaactctaacaatgaacttttattgtttagtggttaattatcttgattctttgttttgccctttcttggccactcaggaatctttcaagctcactgtggacagggaaagtgacttgggtagagctaacataacttcattgtgctgtgcagttagaattttgaccaaagatgtgggtaactaacttttcctaactaaatgacatttaggtaactaaactaaacgagattttcgtaactaaattttggtgtaactacatttagctttaggtaactaaaacgaagattttattttatctgtggatttttttagtgcgggactaatgtaatttctgattaccattaattgaaggttggttatattataacatttggattggtatattgcttgccatggtttgttctaaatgttagcctttagaagtattcctgattctaaaacatcagttttttttaatagtcctggcaaagtgtgaatcacaacaaaattctaatacttaaaagtaatccaagtgtcacagatggtacccagaagaccagtttgtattggaattaaaaaatagaaaacattaacccatggtagctgtcactgtattctttcaaagaagccaatgaaataaactgttttctccctctatgtggtgtttttctacttgaacataaatgcacattttattttatttccagactttttgtggccagcacccaatgaagagcaagttacttgcctcaagatgtactttggccattccagttttaaaccgtgagtataatctcatttaatcaaatcacatatttagtattctctttaaaacaagggaaaaggcaaataacctgtctgcttaacagcaacagcacaacttcactatagttatacatgccacactgtattttctgtgtgactacaaaattatttcaaagtgatatttatataaaattcatttctgcaaattgtttttataagtgaggaaaaatggttttcctttaactgagcagttctgagtagaaactagtttaaagatacttataaataaatgttaatttaatactgacttgtttttcattaaacgagtgtctatgtgcctgttttgtgtatattacccagaacatgcagatgtactagaagttcttaatacaacaatttgaggaatagtgataatcttatctattttaatgtactcaaaatttgtttacatctaacaggcacatttttgtgaggattaaatgagatgaataagaatgagatgaacaagtaaatgtgaataaaactaataagcctgtgaaaatctagactggatttttcctattctgagaatttaaaatataatccactgaagtatttctttccttttttcttttgatcttaaacattttttatttatgtcttacatacagaaaagtgcacatgttgtagagatcaatgaattgtcataaactgggcaccctgtggccagcacttagttaagaataggtcagtaacagcatgccagaagaccacctctccaattgatttttcccatgatattttattaagaaaattttctaagatgtagtaaagttgaaagaacttttttctgtgcatgtctgtattcccaccacctaaattcaactatcattactatacttgctttatcacatatccatccattcatatgtctctatccatccattcattcattccagttttaaaatgcatctcagggtcaatcgaggacaccattacacttccacctaagtatttcagcatgtaaattattaacgagttaaatatttacttaacagttttttctttggtgtaaaatttgcacgtaaggaaatataaaactttaagtgtacatttgcaaattttaaatatacatgtgcatacccatgtaacccaaattcttatcaagagatattattatcatcaccacacagagttcccttatttcccttttcagtcagtccttgtccctgagcatttctcttattattttaaagtattgattcttttggatatctagtatgaagcttagaatctgttttttactttagatgtatgtagtgaaatttaatatatataccaaatggtagttgttagttagcttgaatgggacattggtcaaatggcattgtttgttttaaagttccaggtttgtgcatttatgtatgaagtttgaaaataaattctatgagaggaaatgaaaaattgaatggattttaatttgtaccttgggtttcttattaataaaacaaaatagctttttgcttttcaccttcaagagttcagtggaaagtgattcattcagtattagaagaaagaagagataatgttgctgtcatggcaactggtaagttgtacttaagcaaaacctaatcctttaaaaaaataaaacataaagagtttgaaatgcttaatctttcattaaactctcaaaatacaaatgcaactacaaatgatgtaaactatagaagagagtgaacaaagaacagatgctcagatttatgtatcaattagcttttaggaagatagcatactagtattgaccattcatctgtataagtacattgtaaaaagaaatgaaagcatcaaaggtttatttttatttctatatttttttcattttatttttatatttttttcatttcaaggatatggaaagagtttgtgcttccagtatccacctgtttatgtaggcaagattggccttgttatctctccccttatttctctgatggaagaccaagtgctacagcttaagtaagtcatgttatcattgccacaatatcaccctctttttttcttctgtgggtgaaacatctgatccatcatgcatgttaaaatctagttcacaataacacatttctgcaggtattgctttatctttattggtaataaatgaccctttagtggaagagcttaccttctttcttgtgttctctgtaattcaaagctaccaggtggccctgataaaatttttttaaaaaacattattactttatgctggtttacattgaatatctcaaaattcttttctctttttgttacccttgctttttagcttgataagaagtgtatacatggaagtatattttttatctatgaaacacttttcagcttcttcaacctgagcttgcaatctgttttaaattgatacataatatctttacatattcatggggtactgtagtattttgatacactcatatcaaatacacttgatcaaatcagggcatttgttcatcaacttgaacatttatcatttctttgtgctgggaacatttctaatcttttctttgagttattttgaaatacacagtgttgttgttaactatagttaccctactgttggttaatgagtacaaacatacagttagaaggaataggttctagcaacctattcctttaccccctgtcatcccctgctgccctgagcttgcagtctctttcaaagacccaccttaaaaacttgcattctgataaggcccttgaaggaatttgcttatcaagttagtaagtgacaaaaaagaaaattgcaaagaacaggaatataaattattatatttctttattctttctcacttaagagtgaaattgatatgtgtaatgtgtacatggtgccagaatatttgtttttcttcttatagaatgtccaacatcccagcttgcttccttggatcagcacagtcagaaaatgttctaacagatattaaattgtgagtaatttttttccctcaacttttattttggatttatgggggtgcatatgcaagtttgttacgtgggtgaattacatgttgctgaggaagttgtgagtaatttatgtcatttctaatcatgtggtcagatgtctgtggtatatgagagaattttgtatacaaacaaattttactaaatgcatgaaaaaaaaagtccatgattttaaaatgcactttcttttgtacctttgcaggactgttactttttaaatccttcaaacttgaagaaatctgttattctcggttcttgggctataagattagcattgtactcatagaattataaaaattttggttttggaagagaagttggagaatataaagatttgtctcattttatagatgagaaaactgaggctcagagacaagtaatttgcccaaaatcacacaatgactggctgagcagggactggattctaggtctcttgcccaaccaattctatcatgatgtaattcctaaggagaatgtcatctcagatacacatacacacacccattttgtgtgtgtgtgtgtgtgtgtatatgtacacacacacacaaacatatgtacacttatatatacatacacacacatatattaatatatatgcatatatatgcatgttctaattcagaacattttcatcactcccaaaagaacacccctgcccattaagcagttgctttctttacgtatatattagtatatacatacacacgagatacacatatatttactgagttttgataaatgcatacaaagatgtaaaccaaacctctaacaagatacagaatatcactgacactctagaaagtttcttcatgtccctccccagtctgtccttccatcctccatcctaggcaagccactgctccgattttctctaccatagtttggtagaatgccatataaatgcagtcacacaatattaactcttttgtgtaagacttctttcatttgctgtaatgtttctgagattctttcatgctgttgcatgtatcagtagttttttgttttgttttgttttgtttttgttttttcagagtcagggtctccttctgtcacccaggctagagtacagtggcgcaatcatagcttactgcagcctctaactactgggctcaagctatcctcctgcctctcaagtaggctaggctgcaggtatgttccaccatgcctggctaattattaaattttttgtagagacaggatcttgcttggttgcccaggctggtcttgaactcctggcgtcaggattgtttccagttttggattattacaaataaagctgagacacatataagtctttgtatggacatatggtttcattttattgatacatgtcaaggagtgggatgactggatcgtgtggtggatatatgtttaactttcttttttctgagataaaattagaaggcgatcctcctgccttggctttccaaagtgccgggattacaggcgtgaaccaccgcacctgatgcagttgttgttgttgttgttgttttaatatctgattattattttattgtatttcattgaatatagcacagtttgtttttacattttcttattgatagacacctaggctatttttctggttttggactgttactaataaagctgctatacacatccttataaaaatcttttttgtgaacatgttttctttttttctaagcattttaaatcacctttattgaggtgtaattgacttacaataaattttatatgctgagaatgtataatttgataagttttgacacaggtatgcactcatgaaaccatcatcacaatccagataatgaacatattcatcacccacaaagtttacctttttgttttaaccccagtcaccgggtaactgctgagctccttcctgttactgtagactagtttgcattttctaaacttatatacatggagtcattcatattttatgtgctcttttttgtctgatttaaataatgcagtataattattttgagattcattcatgttattacagtgattaatagttcattcctcttattgttaagtggattacattttatggatatccaacaagttgtttatccattcacctgatagacatttggatcgtttccagttttgggttattacaaataaaactgctatgaacattcgtatgtaagtctttgtatggacatatgttttcattttattatatatgacggagcggaatgactggaacatgtgatgcatatatgtttaactttcttttttctaattgagataaaattcacagaacataacttttaccattttaatcattactaaagtccagtgggttttggtatagtaataatatataaccatcataattaattccagaacattttcctaactcccaaaagaaattccatacccattaaggagtcattccctattttcccttttcttttctttctttttttttttttttgagtcagggtctccctctgtctcccgggctggagtgcacttgcatgatcttggttcactgcatccttgatttcctgggctcaattgatcctcccacctcagtctcctgagtagctgggactgtaggcatatgttaccatacctggctaatttgttttattttgagtggagatgagattttgctatgttgcccaggttgctctcaaactcctgggctcaagtaattgtcccacctcagccttccaaaatgctgggattacaggcgtgagccactctgcccggcctattatctctgttctgcccacttccaaccactaatctactttctgtctctatgatttgcctattctggatgtttctataaattaacttatacattatatggccttttgtgtctggcatcttccacttagcatagtgatatcagtacttcattcggtctttttttatgactgaataatattccatagtatgggcatacacattttaaaaattcattcatcagtgatggacatttgggttgtttcctttttggctgttatgaataatgatgctgtgaacatttgtgtaccaatttttttatgaacatacattttcaacgcttttgcatatatgcctaagagtggaattgctgggctatatgctaattttttaagaaactatgaagcttttgagagtgattgtatcatgggatattcccaccagcagtgtatgagaggtccagttcctccccatccttgctatcacttagtctggctgatctttaacttaagccattctaatagtatctcattgtatttttagtttgcttttccctaatgactaattatattgagcatttttcatacacttattggccatctgtatatcttctttgagggagtatctgttcaaatcttttgcctattttttcttagtgagttttgatagtcatttctatattctgaatataaattatttatttgatatatgctttgcaaacattttctcctagtttatggcttttcatactttccacacagttcttttgaagagcagcagtttttcattttgataaagtccagtttgtcgattcgttcttttagggattttgcttttagtgttttgacccaaggtcacaaagatttgcttttatgttttctcctaaaagttttatagttttaagttttacatttagatttacgattcatttttagtaaatgttgtctattgtatgaggtattgattacagtttatgtatttttcacatattgttccagctccattttttaaaaagactatgcttttacactgaattgactttgtacctttgtcaaaaataaattgactacatatatgtgggtctattgctgcactctctattctgtgttctgtggatctatttgtctgtcttgattggtgtcttgattactgtagctttataataaacctggaaatcaggtagcgcaaggcctcttgctttgctcttttctttcaaagttgttctggctattctatgtcctttgtatttctgtgagcatgtcagcatcaccttttcaacccatatgcctgctgggattttgaatgagtttaccttgaatctagatatcgaaacaattagctgtcttgatagttattgtcaccgttttataccgaagaaactaggcatactaaagtaacttggctaacatcacttaccttgtaagaagtagaactgggctgtttgacatcagagcttattctttataccatttcctatgttaattagaatacaatattaatttcataaaggtaaaggcatatctgttttgttcctatttgattccttgtgaaagcacaatgcctagcgcacaatagacacttaaacttatctgttgaatggacaggtgaatgcttttaaagtctttccatatagaaaattaagtttcattacatttgacttgatctaggttttcatttcatagaatggagagcagactctgtaaatattttgccccagacctagctttattacaaacattgtcttaattaggattctgtctacccagaatagaaattaactcaagctagcatgagtgtatattgaaatttatattaaggataaaggaatgtctcatagatcccactcaaaagaaattagccagcccttaggaagagactggaattgggtttggaaaatacaataggtctttctttttatctgtagtctttagtgagtcttcctcatttttctctctgaagagataagcattctctgcatatatatagcattcttttagattttcgtgacataaagtattatttaaactttcataaggtatcttgattttaagttgtaattccttgagatgattgttttctttattgttaatatgtttcccttcctgtttttttttttttcttttttcttttgtttgtttttacagaggtaaataccggattgtatacgtaactccagaatactgttcaggtaacatgggcctgctccagcaacttgaggctgatattggtaagtgataaagaaagatctctgtaaatacttactgagttaatatttaaagttaaacctatggatggacactggatttcacttctgttaaagtttatttcaaacattacttcctccaggaaatctctgactctctaacttgctgtttcacctatcttatcccatgatactctataattccttttgctatagaaattaggctctgttatcataattacctgtttatatatctgttttcttctgctaggctataaacttttcaagggaaaaatatcactttttaaaatttatgtttccccagtgcagtgcttggcatataggcacttaaacatattgttgaatgaatgttgaatcctaggttctgtgaaattttaatttacttgtttttcatgttctgtatctaaattaagtcagtgtagtggttttgtaccctctttgttcataagaatcacttttcaaactttaaaaaaaatgtaggtaaccaacacccaactctgaaaattctgatttaacaggcctgggttggcacctggcattggtggtttctcacaggtgattctgatatatagcccgggttggaaaccacagtacctttgattagttgccactagtgagtatgatttattacaaaaaccaaaaacttagataagtcacagtttatttcctagaacgtgtaaatatagaattagtcaaaagctgatagcactttttttgtacttaaaaatattttaagcctcagtatagtgagacctcatctctacaaataattttttaaaaaattggccgagcctggtggtgcatgcccatagtccaagctacttgggaggctgaggtaggaggattgtttgagcctgggagatgaaggctgcggtgagccaagatcatgctactgcactccatcctgggcaacagagcgagaccatgcctcaaaaaaaatttttttttcttcttggtggttaggcttaactatccaagaattgcaatcatggcttctattgcaaatgcccctatttcccaccttcagttggcctaaccaaatttaatttttcaatatcatatgatctttttgtataattatgtattcaaataattccagataggttaggttttcgaattgcaacgtctcatttaatggttactttcatataactgtaggaaagcatttgataatttttccaacaatgtaatgaaaacaaacttgtatcttttttattatgtgttaaaaccaacaaaagaatgagggcagcaattaacatttcattaaatatattagcaatgagtacatttatgagctcttaaactcccttattgacatactgtattttttgcctttaatggacaatgaatttgatatgtttcctaataggttgtatgaagttattgtgaatatttcactttggattaagaataactaccctatatataaatttcatggttgtattgcaaaagctggggtctatgtccatagtggtttgggtacgtttttactatttgctttgtttctgtgatagtgttaaatgaataataagcttaagtatttaagcaaatacttaatacttctgacaagtagttagaactctctatttttgtttttttgtaatggatgagttatggacactgcaattattagagcagcgtactttgcttatgatggatgaaaatgttctctggttgactcagtgttgaataaaaagggatacatgaaataaaaattatttttgaaatattttcctttgccttttgttgcgggaaattgtacaatgcttgcaaaaatgaatatacgcaggatattatttgtacagcagtctgacatttagctaatcagattcctcatttttaggtaaatgttaaattacttaagtagtctggatttttaacagaaacagcaaacatagttttatagggaggctccttaccaaccagacttttaacttaagtgaatgttggcaaaagcttgtctaaactgatttccagggataaggtttagctccattaaaagctagtttgtcaaacctgtaactaaagctttttaaaaaatgaaagttttaaaagagaccatcattctgttttaacctatttaatttaaaatctgggctgaagtaggagtattgcttgaacccaggagttcgagaccagcctgggcaacacagtgagaccccatctctgaaaaaaaaaaatgagctgagcatggtacctgttacagtgctagttatgaaagaaagaaagagagagagagagaaggaaggaagggagaaaggaaggaaggggctgggagtggtggctcacacctgtaatcccagcactttgggaggccgaggcgggtggatcatgaggtcaggagatcgagaccatcctggcgaacatggtgaaaccctgtctctactaaaaatacaaaaagaaaaaattagccgggcatggtggtgggtgcctgtagtcccagctactggggagggtaaggcaggagaatggcatgaacccgggaggcagagcttgcagtgagccgagattgcgccactgcactttagcctaagaaaaggaaggaaggaaggaaggaaggaaggaaggaaaaatcagtcactcactcaggtttagtttcaaaagccaaaacagtgataatattgaattttttccagccactcagtagtacccagagaattttgatacaaataactgactttgaccccatgtttagtaggttttttttttgtttgtttgtttgttttttttttttgtctttcttctccacactctcttaggactgttgtagcttgtaatgttagtgaattgtaattgtttatttgcatgtctgtctcctcttttagaattgtgaactcctcaggtcatggattgtattttattagtctttttattcctagaaaagtgtttggataataatagatatttattaaccataataggagtagtagcatttttgtgtgtgtgtgccaggccctattttagcattttatgtgaatgatataatttaatttttagagcatctagaaaatgttaggtaccattattatccacattttacttgtgagaggactgagacttggaaagcttaagtaacttgcttaaggtaatacacatggcagatggtggagccaggttctgcatctgggcagtctgactttagagctttttaatcatcctcctcctagtgtccgaacattattaatgctcagagaagtatcaaagaatgatgatactcattgagggaaaaaattattcttaagtatcaatttgttaattgaggacaaaagcactactgttactactgtgaaaaatctgaaaacattgtcacggatgattttacaataacatccttttctgacatgcattacaacacactattgattccgtttcaatgtttgtgtctggtatgggggcggagtagagaggctactacaggaagaaagaacaaataacatttcttcttactactttgtgcatcatgtgatttagctcctcccataccattttacattagaaaatgtggctgtcctcctgtgctctagtactggcatttcagaggactctttgcaatatgatatgtgatcaatcatggatggcgatgcagttaatttcagtagaaatttgctgactctttttatctcttttaatagctaatgcatgagataaaattgaaggtattaccaaggagaaatgcaggtggatagttttggaggcaaagtcacagtaagcaattcatctctccaaggaatagtgatgaaagctgagatccaataaatgtcttgtttggattaatacataaatatttccttttaaaattcttaaggcttttattcatatatctcccctctccctatttccaataatgatttttggtgttaatatgatgatatttatgcttctgtttttataggaaccaaatactttgatttggttatttattctcctttggagatgtagatgagtttattttttcctttcgagctttatcttttcctttatgtgtttttctttttttacaggtatcacgctcattgctgtggatgaggctcactgtatttctgagtgggggcatgattttagggattcattcaggaagttgggctccctaaagacagcactgccaatggtaagctttgccaagtctgatgtcccgaaattacattcttaataaggagagcattcaggattggggagtggtaaagaagctgaagacttcactataaaagagcaaatggataatgtaaaaagagaactatttttttaaaaatgctaaagttggtatataatctattgaggaatataatagaacaaggcttgacaaaccttttctgaaaggaccagataataaatatttcaagctttataggccacatgtagtctgtatcacatattcctctctctgttttttcttttagtaaccctttaaaaatataaagagttacatttttcactggtgggccataacaaaacaggctgtgggccatatttgtccgaatgtcttctcagtgatctttcatccgtatgtccttttactctaggatgctgtgaaatcctggttaccccttcttgtatcacattgaaaacctaaagtttgaactattctatagaaattttattaaagcttttggtattagaatttccctttcttccctaattataaaaaatagcaaattttggccgggcatggtggctcacgcctgtagtcccagcactttgggaggccgaggtgggtggatcacctgaggtcaggagttcgagaccagcctggtcaacatggtgaaaccctgtctctactaaaaatacaacaattagctgggcgtggtggcaggtgcctgtaatcccagctacttgggaggctgaggcaggggaattgcttgaactcgggaggtggaggttgcagtgagccgagattgtgccattccactccagcctgggcaacaagagcgaaactctgtctcaaaaaaaaaaaaaaaaaaaaaaaaagtgaatttttacatgaatattctacatgattggcatatttacatgaatggtttaaaaacccacaataatagcactgttttattttttattttgaaaattgtagattcacaagaagttgtaaaaaaaaaaatacctatatagaggtcctatgtacctttcatccagtttcctgaacagtaacatcttgtgtgactatagtacaatatcaaaactaggaatatgacatttgtacagtatctagagtttattcctatttctctagttttgtaagtactcttttgtatggcatgtgtattgttctatacagtttaatctcatgtacatttgtgtaactaccactgcagtcaggatgccaaatgttcccttaccacaaagctccctggagctgttcttcccacccctggccctagccactggcaaccacaaatctggtctctatctctaaaatattatttcaagaatgttatatacatggaatcatgcaatttgtcaccttttggaattagtttttttcactcaacataactaccttgagatctatccaagttgtttgtggtcatgtgttgcctaacaacagggatatgttctgagaaatgtgttcttaggacattttgtggttgtctgaacatggacttacacaaacctacatgataaagcttactgcacacctaggctatatgatagagcctattgctcctaggctgtaaacctgtacagatgttactgtaatgaatattgcaggcaattgtaatacaatggtaagtatttgtgtatctaaacttatctaatgtagaaaagacacagtaaaaatacagtataaaagataaaagatggtatacctgtatagggtgcttcctgtgaatggagcttgtaggactggaagttgctctgagtgagtgagggagtggcgagtgaatgtaaaggcctaggacattactgtacactactgtagactttatacatattgtacacttaggcgacactaaatttttaaaattttctttaaaaattttctttcttcaataataaattaatctcagtttactgtaactttaattcataaacctaaaacattttttgactttggactcttgtaataattcttagattaaaacatgaacacattgtacagctgtacaaaaattttttcttccttgattaatgcattccataaggctttattttaaaattttattatttttatttttaaaacttttttgttaaaaactaaaatacacacatatcagactagacctacacagggtcaggatcatcaatgttgctgtcttccacctccacgtcttatcccactggaagttctttaggggcagtaacactcatggagctgtcatctgtgataacaatgccttctcctagatacctcctgaaggacctgcctgaggctgtttttcagttaactttaaaaaatgaatacgtaggaggagtatactctaaaataatggaaaagggtataggtaaatacgtaaaccagtaacatacttgtttattattcatcaagttatatactgtatataattgtatgtgctatactttttaatgcctggtagtgcagtaggtttattgacagcagcatcaccacaaacgtgagcagtgccttgtgctaagacattatgctggctatgacatcacttggtgataggaatttttcagctccattataatcttatgggaccactgttccacatgtgctctgtcattgacagaaatgccgttaagtaccacatgactatttttcggtggtctgttcctttttattattacagagtattccacagtatggttgtaccacagtttaactgatcacctgttgaagaacttttgggttgttttccagtttttgactattatgaataaagatgctatgaacatttgttcatatctcaaaggttctttatttttttttatttatttttctttttttgagacagtctggttctgtcaccctggctggaatgcagtggcgcgatctcggctcgctgcaagctccgcctcctgggttcacgccattctcctgcctcagcctcccgagtagctgagactacaggcgcccgccactgtgcccggctaattttttgtatttttagtagaggcagcgtttcaccgtgttagccaggatggtctcgatctcctgacctcgtgatccacctgcctcggcctcccaaagtgctgggattacaggcgtgagccactgcgcccggccttcagagattctttaatgggtgaatggttaaacaacctgaaaatataaaagttttcatttctctgggataaatgtccaggagtgtatttttagtttttaaggaattgtcacaaacctgttttccaaagtggctgtagcattctacattcctgtcagcagtgtgtgaatgatctagttatccttgccaccgtttgttgttgcaactgttttttattttagccatttcgataggtgtcgagtggtatctcacttttaatttgcatttctctcatggctaatgatggtgaacgtcttttcatatactaatttgcctctggtgaaatttcttacataattggagtgcttgtttttttctgttgagttttaagagtttaaaaaatacattgtagatatgagtccttggtcagatacgtggtttcaaatatttctttcactttgtagcttgccttttcattctttttaccgtgtctttcacagagtaaatatttaacattttagtgaaatccagtttatcattttttcttttatggattgtgctcttcacctagccctagatcctgaagattttctcctgtggttctttcctaaaattgttacagttttatgttttaagtctgtgatccattttgagttaaattttgtataaggtgtgaggtttaagtcaaggttcattgttttcccaatagattaaattgcagcagatcctttgttgaataggctgtccttcccctgttaaattgcgtttgcccctttgttgaaagtcatgtgggtgtatttgtgtgggtctatttctgggttctctagcctgttatattaattttgaacgaataaagttggcttatgtttaagttttcttggtagtagcgaggcaatggtgccttctgagcccaggatttcacaattttgtgagtaaactgtgttagaaattgtttgttattcttttggtaggttgtctagttcaatttcattgctcattaatcttgcttatagatagcaaattgagaggcatctcaaaaatagtatcttttgttagcttatctcacagagtttggttggagcagatattaaaacaacaaaccaaaaataaattaaatatactagttagcaagtttatattgagggaaaatcaaaccatgtgaattgagctccaatgatgtggctggccttgggtcagattttagtatcatggttcaacaaggtagctattaaaatcttcatactttttcttgaaataattctttagtagtcacataggacagcacacactcatggatttcttctttccttactgtctctttattctcagcctcctgttccttctcatctccctgaccttttaatgttggccttccagaaactttagtctttggacctacctttgcactcattttcttggtcatttcacccaacatacagttttatgttattttattttttttatttttgagatggagtttcactcttgttgcccaggctggagtgcaatggcgtgaactcaccttactgcaacctctgcctcccgggttcaagtgattcttctgctcagcctccccagtagttaggattataggtacgtgccaccatgcctagctaattttgtatttttagtagagatggggtttcaccatattggccaggctggtctcgaactcctgacctcaggtgatccacctgccttggcttgccaaagtgctgagattacagatgtgagccaccacgtccagcctacagttttaaatatcaagtctatactgaggactcccaaatttttatctccatcatagactgatatcagcagtatatgagtgattcagttgtttttgcctctttgccagcatttggtgttgtcactattagttcattttagccatttaatagaatatatgtacatatatatgtgtgtatacacaggcacacatctatataactactcaacatgcctctggtgagatgaccaacaggtatctcaaacttaacctcttcctaattgacttctgcatagcactccagatctgctctttcctcactctcctccatcttgtttaacagcagctccattggccaaaattttggaattttcctcaatcttttctctttttcttacactccactgtttatttaaacagtaaggaaatctcgtgaggtcttcagaatatatgcagaattaaatcacttctctcttgatccctgccattccccaggtacgggccaccatctccttagggcctcctgctttcactcttcccatccctcattctgtttcaacacagcgtccagagtgatactttaaaaatgaagtctgatagatcatgtcttcggctcagaaccatctagtagcatgccatttcattctaaataaaggcaaaagtccttatgatgagttaccgatcctcatgtaatctggccttccattttccctctgatctcattctctactggtctcctcattcaccggatgcagccacaccaccctccttgtttttcttcggacattccaggcatgcttcagtgcctgggctttgcgcctgctgcttcctctccctgaatacgtttcccccacattgtctataggatgttctcccatacttctctcagatctcttggatttaggcctcctgggccaccatatttgaaatatcagattagttccccctcccccatcattcagcattcctcgtaaatctttgctgttttaaaaatagcactatcactgtctaacttactgtgttatattttgttaattttctgtgagttcttcttcactagaatattctttgtagggaggagtttttgattgtttggtttataaaatctggaacaatacctggcttataggaggtgctcaatttataatggggtgaatgaatgaatgaatgatgatgagaaagctgagaatcagtaaagtgactttccaaaacaggtagtgggcagtatagagttgggccataaatagctgcaccatacaacatcctgctagtttctaaagcaaatgatttgaaagaggcataaaacataatttctgccctcaggtagctcatagttcagtaaaggagtttagattcatacctataacagtagaagtaatagcaccaaatgaaatatggtattatgaagtggtacaaataatataaaaagatgaacagtgttagtagtacatgtttagaagggatttctgtggtgaaagtcactaggcacagtgcacctggaggaccgatttccattaatttagaatggtttaaagtaagcttttggaaactaggaagattactttctgtaatcctttcctaggcctttgattctagaaggattgtgttaaaggagttttaaatattttatacagttcttaaacattgttaagcttgaattaaatcttttattatgtctggccatggacgtcattggatcattttcatttcttgggaggattaataaagcacattccttctgttgggcctccagtgcggggagggtgttggccgagcagtggctgagaaaacgtttttcccctggtgttttcaagaaccctctttattagctaagtggtgagacatgccacctggtggttatagtagtatcatttttctcactgttcttggtgcttttcttctcgttctgattccagttatactaggacaactgctataaacctggaatgtttcacactatattatttcagtaatttcaaaaacagcagaaatcactaagctgtttggcacaaagattcctatttggaaggaatcagacaaagtgagtgttgagaaagaacagccaggcagaaagctttgcatcagtcttaaagttctttacatttcaagtaagaggaattgtgaaatccataagacatgtggggtttttctattactttctccccagtatctattacaaagatcagcacatagtaggtactcagtaactatttagaatgagtgcatgaatgaatgaagtatgtgtgatgttatggagtacaaagttagaattagcaacatgacctgaatttagaagcaggtgggatacttatacttttctcagtctgtgggcaccacaccattgaagtatatgtctaagattaatttatatttggttgtttgatttagcaaaacttgctgcctgttaaaaaagaaattaagacctgtcaacttaaagaatacattttgtgagttaagaactaaatgacagtataatttattacccaaagcagtttgcttctgaaaattaaagagttcaagctattaataattatgctgtgactgcaggcataaactgggaatgtcctggcaaatgaggatgtattgtcacctttctcagcctgcctgtgtgttgtttttaagcttcactctagtttatatattttaaatgtcataaaataccacatacttataagagaaaaggttctattcattgctgaagtggaagcttatcattaatttttatttatttatttttttttccagttttggaattcttattactttgaacccaagaaccactgataactagcacaatccagtgaaacagaggaagcagcagcttaatcaaaggaaaaatacatttaagattataagtctggttataagcttaaaaagtgacccagaaagggatatcattgctaaaaaaaaaaatccccttgtgacctgggtacattttgcaaagccacaggtttgcagtgttacacaagggccaaaggaggccatgagttgtctttggttgtggggccggagggtaactgttcatgaaaatagtgagtgtctgaagattaagaaaatcatgctgcagcagaggagaagggagaggaaggcaggaagggaaaggagatgcctgagggtcaaaagctgagcccaagcctaagcccaagctcaagttcaagccccagcatggcacaattttgtgaattaactcaggctgagttgcctccagtctttggaatgtcatcttatactggtactgctgaggcagagggcagtaattggttctttgggataggagaaggggcagttgctgaaatacaaaattaatagtcagcatcccaagttcctcaattgcagccaaaatacatgtgttcaggcctttcggcagtaccgcccccagaactaccagctgtagtgtggtctattcccagacagcaacatgcaagaataagtttacaatacactcagcccttgtggcttaagatcaggggctcagaggctgtgacaactcatgatgctgaaaatgtatccaatgaaaacgaagtactagcttgtttagtagtaacgaagtactattaatttttaatatagtctgatactttattttctaattgtagaagcaacattcttagctatatctttctagaatgttgaggcaaaagagtaaatttatagtgattttcactgttaccagattgctggaatagggaatttctggtagcaagatgggaatttttaagttggaagggtctaacacatcatatagccgtctccatctcattttttttgctgaaaaaactgagcccttgcaaatgtcagttgcaaatctgggagtagtactcatgtctctgaagttgttatatagaattctttttatttattttaataacaatatttatgatagttgaaactttttgagtgcttactatattttatttcatgcattatgttcagcactttacatgttttatctcacttgatattcacaactttatgagattggcactgttattgtagccattttatagatgaggaaactgaagcttagagagttaaataaagagctcaaaatctcacatctagtaagtggcaaaaacaggatttcagctcaagcaatctgattccaaaacagacttttttcactgtgctgccattcttttgcctggtttttctgttaacttcttaaatatatgtcatgtttcatgcttacttcctcattttcataaatatattacctgctcacttatacattatattgcttagaaacaaacccaaccctgttttcttatggactgtatcctgaaaatcactgtttttaatatgtggttaaacaagtgttttattagtgcatttatataaattatttaaccaaaacacttaaccggtgaaagtgctttactgtgtgagaatgtgcatgttctaagaacctctaatttttaaacctcccttattctcagccttatatttgttaaaacctgtgtgttaacacagatgcacccatgttaggggttaattagagaaaccaacctctttatagattagcttgttcatctttaagttgctaggcaggcactgtaaattcagagaacaatctgattgtaagccacaaatcaatgaaattaattttggggttgccttttaaaatagtgtcacaaaatttaaggataaagaatgcaaaaatgatgccaattatctcatcacattagttttgatttaatttttttaatttgaaaaaacctactcttaaacttaattgatttttttaaatataagtttggagataatttttaattcagtaaagttatagtgattgaaaaagtagtttataatttttaataaattgatcttgttttaattttgagtcatattctagaagtgcttctttgcaaattggtaaattgcacatacatttccacttatatacaagataattgctatggttggtttgtataatagatgcagtgcatctgaagagctattttatgagaatattgtttcttgtatctgtcacgagccaaaaagaatatttttaagaaagttatattcttggtgatagaacagctgataatttagaaacaactgtaagacagtccactttttctgattatgaaataataccatagttaagtgtaatttcctataatagaataaaaacacgagttctagttttaggggaggcatgttgttaccgtaccttagaatttctggaagatgacatattcatgcttttcctgataactgctgagtctcctgctctgtctgccaatccagtcaagaagcctttgctagcaatcaattaataatacgtttcatttatacatatttcctatatatagtatgttattgattatctcagtaccactgaagagaggttatctgggtcattggagctttgcttctagatttgtgaagccataaacctatatatttaaaataggaggccaaaaaaaaacgaccattgctttatatagttagattttcagtgaattgagagtttatcatttgtaattatacattaatcaaatataaggcataatatacccccctgcttatatcagcaccatttcaaatgtaatgttaaaaaataataaatggagaagtagatagctaacaagtaggcttaatttaataagacaaagtaaatggcatttggaaacctcatggatttaatgttttatttaaatgatttctgatttttaaaaagtaaatattgtttccagaaggctgagaaacaagttagtagggagattttttctttgcaaaaaaattttacagttgtgtctttaacattgtaccacaaactgttgtcctaccagtctctttgtaagaaagctatagacatgttgggaatgaatgagctctttcctttttaaaatatcagttttacatcattcaggttccaatcgttgcacttactgctactgcaagttcttcaatccgggaagacattgtacgttgcttaaatctgagaaatcctcagatcacctgtactggttttgatcgaccaaacctgtatttagaagttaggcgaaaaacagggaatatccttcaggatctgcagccatttcttgtcaaaacaaggtaaggatttaatggttgatgaattttggtaatgatttcctttttttttttttaacaacttatgtattttatgttatttacgatttccttctaatgcatatttaacatatttcaaattccacctagttttggttcaagtcaagcatgatgttatataatcaattcagtgattgagactagtgtatttttaaaagcagaaaccaattctcctaatattttaataccccattctgttgcttaaacagggcatatactatttatttttattttttaaaattttacttatttatttatagagacagggtctctctgtcgtccaggctggagtgcagtggtgtgatcacaactcactgcagcctcaaactcctgggttcaagcagtcctcctgcctcagtctcccaagtagctggaactacagtcttgcaccaccatgcctggctaggacatatacttttaatgattgataagtaaacaagcaaacataaaatgactctttcatctgaattctgtctagtttactaattacatgacttcagtcttaaggagcttagaaaaggtcaccttacaaacacagtggagcctgtattgtgttccaaggactattgtaggcgctttctatataaaatgatctaatttaatccctataactgctcagtaagttacgtattattttcattttattgttgaggaaactggcattagtacttttttctgtttattttgtttaaaggcattttaaatatatatgttaagaagttttcaaaagcctatattttactttttataagcctttattttactatttgagacagtgtcttgctctgtcacccaggctggagtgcagtggcgcaatcccggctcactacaacttccacctcctgggttcaagctattctcctgcctcagtctcccaagtagctgaaattacaggtgtgcgccaccatgccaggctaatttttgtattttttagtggagacggggtttcaccatggtggccaggctgatctcgaactcctgacctcaagtgatccacctgtgttggccttccaaagtgctggaattacaggtgttggccactgcgcctggccagtttataattttaaacattaaaataaatgcttcttgtccaatcatggtgtctcacacccagaatcccagcactttgggaggcagacgttggagaatcacttgaggccaggagttcgagaccagcctgggcaacatggtgaatccctgtctctacaaaaaatacaaaaattagctgggcatggtggtgcatgcctgtagtcccagctatttgggaggctgaggtgggaggatcatttgagcccaggatgttggggctgcagtgagctgagatcacaccactgtactccaggctggatgacagagcaaggccccgtttcaaaaaaaaaaaaaaagcttctaccaatacaaacacaaaacaagcatagacaaatagagtttaaagaacatcattggtgttttcctctaaagggaatattgatgctaggccaagaaaatcctggagttattcttgaggaccttaaggaataattgaaatgtaggatttgctcctggctttcttgtcctatattcagaataaaacaagaatggatcgaatatattctgagtgttctggccattctagtgctctctgaagtgagtactcactgtgtttcacttccctttcatcctaaagaggaaaagttcttttgaagaaggctgtttgtcctaggttagagtctccacagtcagatcattatctcctcctaatctttgatcctgttcagtctctatggtactttcccttataataacactctctatggcactttcccttataataacactctcctttttaaagcagtttgccttttttgtgtgtaatattgttctcctggttttctgacgtcctggtcctcttataatcctatgcaaatgtttctttctgtttttcatgttgactctgctaattgaggtctttgttactttttagccgagactattataatttccccaacagatacccctctccccagtgccccttgttgctttctatgcagtttacaaattattgtctgcaaacacatccttaagtctggaatacctttctggaactccttactaggaaataaagaccagactcagtgtaacattcaacagtattgaagatctaggtatttaatatgaatttttttttttaaggagatcaagaaagatttttgtacccatttttaatcctccaagaagacttaggatagcaggaaaccattgagagtcagaatgctttctacagatcttaggtgaacagaaactttcctcttcatgagcagtgaggtagagggtaattaaggcttcagagcattgcccgttatttccatcttcttcccttcctttaattctgctaaattcctttaatttgtttatcagtattcaagtatttttatccattgagctaaggtgtttcttaaactaaccctattttgttaaagtcttaattataatatattcatagtacatttaagtgagatagatgagtctctcatataatttagtggttagattagattagaattttctcccctcagaaaattaagaggaaataaaagtctgtagcaaatcacttggcaaaataatggctccttttgtaataggaatttttactcttttgatttatctgttacataagttcaaatttttacatattttccaccttttttaaaaaagagtgatatgtagtcaatatcaatttgagcaacactgttgcatataaattgaaaaggactccaattttctaattccgtacctcagttgtgatcactgttggtattttggcatttatgtagacttcctttctctgaccctactactgtgcagatatatagttgcagttttttgttgttgttaagttgatacagaaatagttgcatactatatccattatttatgcaaattttttttcatttaaagtatctgctatctttccatatattgcattttcttaaattagagccttaatatataggatattacaatatctaggttttgttgagtagttttttcttctttgaaaacatgtttttaaaataaggtttttttttttttttttttgacatggagtcttgctctgtcgcccaggctgtaatgcagtggcgggatcttggctcgttgcagcctctgcctcctgggttccagcgattctcctgcctcagcctcctgggtagctgggattacaggtgcatgccaccatgccctgctaatttttgtatttttagtagagacggggtttcaccttgttggccaggctggtctcgaacttctgagctcaggtaatccgcccgccttggcatcccaaagtgctgggattacaggcgtgagccactgtgctggccttaaaataagatttttatacactaaaagaaaacttacatttttcactccattaagtagttcactgtgaatttttgatattgaagcccatttggttgctgtcaaaaatagatttgaacagattattcagtatgactcttgtagtgaaattattgccttgtttcctctgcttaagttttcagtggcttttgccacagtccttaaaggttttataatttttttaatgtttaatttttaaatgtttgcttaatatttcttagtatgagtgtagataatgatgaacatttagatgactttttactattataatgttgcagtgaatatttgtttacatttatcttttggccaataagcaaatatttttgtaaattagaatcctaaaattgaaattggatcaaaagttatatgcacttgaaattgattaacttttcctaaatctaaaatagtatagtcttttttatattgtcagcataaatgaatgcacttatgtaaatgaatatttttaggcgttaagtaaaatattctgtggaaattgaacatttaagttgtttatacttctatggaaatcgtttacgcttttaataaagaagcacaagtttctacaaaatacattctaacagatgttttctataacattcagtctcaagattactagtaaatacttctttgaactgtaaaagcaatctttcaatattataagaaagctcttgctttagtaaacatttagaaactcagctttattatcataagcaagaataagaacagtgtaacaagttttatgcacactcctttgtaaaccctcaccagactaattgttaatctggtgccttgcattccccaaagtatttgtatctgtcgtttataagtttttatcaaggtttcagctaaaacaaataaatttgtttctggttttagctttaatttgaactgaaacagtcaaaactgagttttggggacttcacacaattcatttggatatttgattctccataatgttttaaattttcatgcacttaaatatatcattatttttgataggctttcttcctttagtcttttctttagaaggtagaaaggaagaattaaataagataaaaccaaacgggtctgaagcatgtataaagtatatatgtttgctcttttgttcttctttttctttagttcccactgggaatttgaaggtccaacaatcatctactgtccttctagaaaaatgacacaacaagttacaggtgaacttaggaaactgaatctatcctgtggaacataccatgcgggcatgagttttagcacaaggaaagacattcatcataggtttgtaagagatgaaattcaggtatgaggatcaatcatcattgctctccgttgctcatagtggaagtggatatttctcaaatgtttatttaccagatctttattgaatactttctttgtgttgaacataaagcagtccctctgataaatgtgggagaacaaacttgcagattagtataaatagcaatctgtacctagtgcttaggtgcacagaggagggaggaatagctctgtcaaggtagttgtgtaatgggggtggtccatccaggaaaattcaattagagtccaaacatgtaagtagaagtttttcaagtatgccaggccagtaggtgatgaggggaaaggaattggttatagaattccaggaagaaggactagcaggtgcaaagacactttgatatgagaacacatactgggttcaggaaatgtgactggtatggaatggttggagggaaagacaatgtggggtaggaatggcacaaagtatggacaaagaggcagggtggaaccgttagagacttgagagaacagttgaatgggtcggttggccaggttatagatggctttaaaacttgcaaagaagcagtctgggcttggtatcatatacctgttagttttcactgactactttagccttagaatttttagtttagatacaattttctgtaataggtaaaacggattaaagtagaataactctggctgaagttaatgtgagggaaaaggaggtacaagagtctcgtctctagaccttgaagacactccctgttggggtcttataatccttggagtgccgcagaatcatttgaaaaccatcttgatgtactactctgtgtttttaaataagataataggattatagaaacattagactggcagcaataagttggattgatttgaagaagagaaactgaagaagggaaagggtatcgatgcagctattgtgaaattctacagttgagattcctgacctgattggactggctcagtgggtgtcatagaggatttatttgggaggatttaagttcaaggcacatgagtaggtttaagtcaacaacttgacactgtcaacatgaaatccacactgtaactataagtccgaggaagagccctctcctgaagttaggaatttaacttcagctcttgcattttctgtcccaccggtcatccatttcttctctatccatctccttttctgatatctagttgttatcagtgttgttgaaaagcttaagtatgattcatattcactgtctataaagttcactacacatagtcatgctgtaatgcatacccgcctgaaagcatctggtctctcttttccttctttccaaagataagaataccattcacagctgtttagaatagaaattttatccaaattcttcagtgtttatatttttgttctgttatttcagtgtcttgaatattgtcaaatgacatttattagctactactggtactactgaatcttaataatcaatcttcaagccattaactgaccaatggtttcttctatcttaatgtattagtaattattcatttagagtaaaacatctcccagaacatgaaagaatacaaactttattcatgttacgttgtgacaggagactttgttggatgcgcctgattttcctgccaattcacagcttcattaaaacagtaatgctttgaaatatggcttaggaaacttcacaatgatcattaattacacctaatttctggaagagtatatgcatgtatgtgttgcggtattctcccttgctgtggcaggatgtcacaaatttttatccacattacgaaaatttaaaaattgatatggttttttctccctacgttgatatcagatattttgttttatctgacagctggcccaatgtactcctactttgccattataaagaattcaaaagcttcatatttgcattgaaagttctcaaacactttgtaaagatgatgaaagtatgtttcatcatctatgtagaatagtcaggtgttcttgcaattgattacttgctaccgagaattgaatacctactgagtgcataatgtatagaattctagatattcacttttgtgtgtttttacagttgttatataccttagtgtggctctaaaagtggaggtgacagctgtagctcttaatgtcttacactgagtgatgtttagaatcttaaattttcttttataattttagaaaaaagtatacttttctttcttatttttataaccagatccaaacacatttgcatgtagataggcatttttagtcttgaacattcatttttacttttaatcctcacttttattagtttcgtatctttttgtatttcatttcccctttcaagatgccttgagtcctttctttttaggaatgatgttgtgaataaattatttgataaaatgtctttacacctgagagtttataaggatagtttgaaaatcatgtctgtaaaataggttgatctcacctaaaaataataccatataattaaaattagaattattattgtgttgcttattgactcttacatatatcaaaaaattgctgagtcttattcagccagagcttttacttagtatgatattcattcctatatttacttttttctcacctttctcatactttcttttacttactcagcattttcctcctttcctccctcctttcttttcttctttccttcttttctcttcctttcgtattcctggtccatcttagcatgtaatctttctttatgaaatggcatgcagataggtctactgttcttacagtaaaaaacttcaaggcctcatgtctttcccacttctgtttcccattcacaacctttttagctgattcttttggtactttaccactatatcttgccatagtttatgtacctggctcctacttaattttttgtttatttgtgtattagtcgtaggcattatttatcgactcttctctctgaaagatgaaaggttagctctctttcacattcttaactgcccttttttcttaccttgtccatgtatttctaaccccctttcctcctaatatgtttatgtcataattttggctagattagtgtatacgatttacataattattactctgtaaatgctttttatgatctctgagccatgtagtatattatggctatttttctttcttatctatttgtatttttattgttattacctaaaaaaaaattttctatgtcttatcactaattcttccctaaaatttcccacaattgtgtaaacttacctcagtatattcatagatatgagacattctatcaattttaccctcttaaagatgcagagataatgcattatgtttcatcccaccatctttaatgagaagcttccatcttagattaatattagagaatgttaaaatactctgcaatcaggtaaggacgcttgaaacttcattataatgcaaaagttttctttaacacaataaatattttgaaccccttttgtgtcttgtattcataggagttcagatagaccactttatttactattttttatagagagtgaacagaaatcccatttctagtcaccagtccttaatctgtaaatcaggcagataatctgtaaatgattggttgaaatcacattgaattccactttgtgccagggacttaagttaacgaacaaattattcttacaaaaaggtataaatgtaaggttttcattctgctaaatatgtttgtcaaactgtgttgtgatttgttctcagtgtgtcatagctaccatagcttttggaatgggcattaataaagctgacattcgccaagtcattcattacggtgctcctaaggacatggaatcatattatcaggagattggtagagctggtcgtgatggacttcaaagttcttgtcacgtcctctgggctcctgcagacattaacttaaataggtaaaaaaaatttattgtttttactcttgcagatttctttctttctttccatataaacctcaaaagtgtttgaggctatttccagtatcccaagtaatttgtgagtgcatttaaagtaaaaaaaaaaaaaaagaaaaataaaacctccccaaatccagaggacatgtaagaagaacatttgtggtaagagttgccacttggagatgagctaatttcagcatgccttagttagtgtgaggaattaactaaatcaggacaatacttgggcctgtcacagagatcctatggaatactttcctaccattgtgcattaatgaacaggttcttttcctctcctcagatcctgtcaagttgcgatgtcttcagccatagttacttcaactaccactgattttgttactgattctttcttcccatgctacagtggtgattattccagaggatttctctcagtccctatttgactcttgttactatttgttttcttggttagttccatgagaccatgccagttctccttgactgtgtatgaatcattgtgttgcactgtactgacagactgccgtaagtcaatattaagtgttcagtatctaagtgcaggagaacctttctacttaagtactcaacaagtagtttgttggcacttaagttctatgagattttttgttgtaaaggaaaacattatcttgcaaagattttggggcagcatttaccaatactttgttccttcatccgtaggaaaaagaatctcaggagaaaaacctatacatggtaaccaatggggctgccaagctgatgaagtattttcagagtacacctttgtgtagctgaataaattgagatcttgaatggacatattagctcattttagtaaaatgataagagagtgcctcccactacagtttttgtttttatgcatcattaaacaatgtgtttttgattgtccactgtgttccatgaactatgctatgtgtgggagatatagtagtaaagaaaagcaaagtacctgcttccatagaattcagtataatgggaatggtaattctttagagaatcacataactatggatacataggcttcattttactgttctccttttgtgtttgaaaatgtcaacaatcaaaattttgtaaaaaaggaatcatgcaacatatttaaaattataactgtgttaagtgtaatgaagggaaattgcactgagtagtaagaatatataatggtgtgtggtatttcccaagttaaaaaggtcagataaggcttccttgtggaagtgatagttcaaatctgaaagaagaataggaattaattaggtaaaaatgtttgatgcaaattttaagattttccttctgagtagtcagtagcttttccttcttaacatagaagatgacaaaaccatcctttttttgtacataacaattcttgttttcctttagacagttgtatctgtcaagcttcttatgatctaatttaaataattgggatagaacacagctgtacatgttactattaaatatggaatatatcaaacataagttgattcctaccagttctgattttatttgtgtattttgttaaaggtactgaggacattaatatccagttttatattgtgcatttgaaggttcatcaataaatacaattcttgtttctctgggtcttaaaagatattttaaatggttatctcattaagatttaacaggaaataacagtgattcaaatcaaatagtggtgccagaaacccatacttgaattttgggtatagacaggttaccctttgcatcaatcctgaggaaactaaaactataggattaatcaggataaaaaagaattgagcaaggattcaggagggatctgtatcatcctggtgacaaccctcttctagaaaaaactagaaagtctaagaataaatgaagttgctggttctcacctggaaaggtcagttactcacaaaatttttagagtctatcttatgccataattctatcactgagagaagaaacttgtccagtcatcatgtaatcttcatgtaaatttatgtttttaattgcagaattcataccacaggcaaagtcccaatgtctgcatttgctgttaccttaaatagtcaaaccccaaagttattgtaatctttttttaacagagaataatttgcagagtaatctcggtccggtagatctttcagtggatccaaatgattgccatgaatggtttagaatttttttaattttcaagttgtttttattctgtggaatactggacttatttttgtagtcccaaaagaaaaataaatatttatttatttgccgttaagagttgtagttttgttttctcaaatttgtcctgacactgacgagattagttaaatgtaggtcatctgaaccaaatacaaggaaggaaggacccagttctgaagagtgtgggcatttcttttcttgtttttttttttttttttttttttttctataggaggggaacgaggtgaactaaacaaacaaaataaagcaaaaaagaactgatttttatcccttgaggtagaaagaatgagattacagtggacccccttgtctgcattttcactttctatgttttagttactcacaaccacgtccaaaatgttaaatagaaaattccagaaataaacaatttataaattttaaatcagtggtggctttgagtactgtaatgaaattttgtgccatcccactcagtctgcctcgacttcccttagaatcatccctttgtccggtgcattcacgttgtatttactccctgtctgttagtcacttgttgcagtatcacagtgcttgtgttcaagtaacgcttattttacttaagaatgaccccaaagcacaagagtactgtgcctaatttataaattaaactttttcataggtatatacatataggaaaaaacataatacatacaggatttggttggtactattctgcggcttcaggcatccactggacgtcttggaatgtatcccttgtggataaggaggaactgtatatggttaacctaggagctagagtcaacagttggaagagactttggggataattacatggaagggcatggtgggtggtcgtttcagatgacaagaatgtttttgaataacggatcatttgtgtcttcagactttccagaactccttgagaattatgcagaggtatttaatcagtcagaaggttgaatagtcaaattattagtgagtgaagtctattttgatgaggattttactaatgctgtcccttagatattataagtaaatcgttgttttcttttgaaatatctgaaacctagttaacatggactttcatttgttcttgtaaagatatgcaaagctatttgggagattgtcatcatctgatatttgatattcatgggctttcttcacagaagactagaaattaacagagtcatgatgaattatggctgcattgactttaaaaaacaaacacctccttaatgttatttaacaattttgaataaatttgatatggcaaacaaatcagttataatcgattgagaaaggaacttaattctaatacttgactggtgtcccataataacccataatactaagagacagttttggagggcgagaagtcctgaagagctgatagagataaaggttcaaatttgagcttctttcagtgttccttacgtcaatgcttttagtttctcatacaaaataaaataaagaataacctttttactgggaaaaggtaaaaattaataaattgtagaagcattgtttgaagccaaaaagtgtgtgacatgtaaattgaaatgaaaaaccttagagtttttgatactttttcaaagcagctaaagaattgatacttggacacaggaagaattttttttcaaaagcaatttttataaaatcagaaaaatgtttacctcttgttgggggcattgactggaaaggaatacaacagaactttctgagatgctagaaatgtttttttatcttgatggggtgtgggttttgtagataatgaaaaataaacagtaaaaaataagtaaaaaaaaaagtaagaaagttgccaatacagttttacatattcctgtgatgtttttaatcgacaggcaccttcttactgagatacgtaatgagaagtttcgattatacaaattaaagatgatggcaaagatggaaaaatatcttcattctagcagatgtaggagacagtatgtattatttattttatgccaatagtatggatttatggatgatgctcttttaagacaacaatttggctaaataattatcagtattttgaaaaaatattttgttgctgttacatgtgtgctgaatttttaaggctaacttctttgtgtctgagtaaactgaagtcaaataatgaagtcccaagtgaatcaattaatggtgattttacctcattattttcaggaatgaacttaacatatacgtttctgttcttttatttaatttaaaattttgtcttgggtagaatcatcttgtctcattttgaggacaaacaagtacaaaaagcctccttgggaattatgggaactgaaaaatgctgtgataattgcaggtccaggtaaagatttcttattatagatggacattctaaaagtctttctttctcttccttttcatgtttaactgaatttttgttgaatgataagtatttcagttttttaaacaaaacaatgaatgtgtttagatatgagaaagcaaacaatattaaagtattttgcttaaaaaatagataaagcaataaaatggtagccctaaatctaaacatatcaatagttatgttaaatgtaaatgatctaaaatattatttaaaggcgtaaattgtaagaattggtttaaaaacatgaccctgttctgtacgttgtccacaagaaatccactgtaattatatagataggtttaaaaaagaatgaaacattacattccatgaaaacattaatcaaaaggaagttggagttactttaatatcagacaatggacactttggagcaaagaatattatcaggataaagaaggatattatatgatgtaaaagaatcatttcaccaatgtatcagtcagggttcaccagagaaataggacgattgatattatggagatatatatatatatatatatatatatatatatggggagggaaaggaagaacaaatatggggagagagggatgaggcgactgattttgaagaattagctcacgaaattgtgggggttggcaagtctgaaatttgtagagcaggtcaataggctggaaactcaggcaagaggtgatgttgcagtcttgaggcagaatttcttctctagcaaacctagtttttgccctttagtcctgccactgagtggatgaggcccacccacattattgacaataatctcctttacttaaagtcaactgattataaatgttaatcacgtctacaaaatattttacagcaacatctagattagtgtttgaccaaacaactgagcatcataggctagccaagttgatgcataatattaatcatcacaaccaagaagacatcatcctaaatatatatatatatatatatatatatatctacttaacaaaaagactgacagaactgaaaggagaaatagagaaatctacagttacatttggtgacttccagcatctctcaataatcaataaaactgacagaccaaaaaatcagtaagaagacagaagaaatgaacaggattatcagcatgctggatctcattgacctttttagaacattctacccaacaacagtagagtacacattcaagtgcagatgcagtattcatgaacatggatcatattcagagtcataaaacaaaccttaacaaatttaagaatcttgtatttgtatattttttgactagaatggaattaaactagaaaacaataacagaaagataacagaaaagtctctaaaccttagaaattaaataacacacttataaataaatccatgagtcaaagaggaagtctcaaggcaaatcagaaaatgttttgaactgaatgaaatgaaaatacaaaatgtgtgagatgcagctaatgcaatactgagaaggaaatttatagcattaaatacctatgtaataaaagaagaaaggtctcaaatcagtacctaagcttacatcttaagcaacaagcaaataagagcaaaataaatcaaaatgaagtaaacataaggaaataacaaagaacataagtcaatgaatagaaaagctatggtcataccactgctgtccagcctgggtgacagagtgagaccctatgtcaaaaaaatttaaaaacaaagcagcatgcagcattcattgtcagtgaatagaaaatgggaaaacaatagagaaaatcaactcaaaagctcattctgtataaagatcaacaaaattgatataaacttctaacaagactgacggaaagagaaaagacacagaagaccaataccaggaatgaaagagggaatttcactacagacctcccaggtattactagggatgataagggaacactatgaacaactcagaacataactttaataatttagatgaaatggatcaatttcttgataatctcaagctaattaaacttacagtgaattagataacctgcatagtgttacaaccattagagggattgaattctatgttaaaaatctctgaaaataaaatcccctagcccaaagaatttcaatgacaaattctaccaaacatttagaagacaaaataataccaattctatagcatgattccatttatataatagtctttgaaacataaaactatactagagggatgaagaaaagatcagtggttattagagattgggggagggagaaggtatgattccaaaggatagtacaaggcagtattttggagtgatagatttatcgtgccctgattgtgatgggagttagatgaatctatggatatcttaaaatgtgtagaactttacacatacatacaaccaatttgcctatgttaattgaaaaaataaaataaaaacaaattatttacctggtgggttagctacgtacctaagttcaatagctgcgttactgtaagacaaaagaagcattattagggatggagttgttctctgtgtaatgacaaatacttcttcactaagaagacagaattgttttatgcacctttaaaaaaaaacaaaaacaaaaaaaatacaaccaacaaacagtaacttgctggtgcggtggctcacacttgtagtattagcactttgggaggctgaggtgggaggatcacttgagaccaggatttttaagaccagtctgggcaaaaaaccgagactgtgtctctacaaaaataaaaaataaataaaaaaaattagctaggcatagcattatgtgcctctagtcccagctactctggaggctaaggtggaaagatcgcttgagcctggaaggttgagactgcagttgcagtgagccatgatggcaccactacactccaggctgggcatcagagtaagactctgtctcacataaaaaaaataataataatgataaaaactagtctgggcatggtggctcacacctgtagtcccagtcctttggaaggccgaggcaagagaattgcttgaacccaagactttgagaacagcctgggcaacatagcaagaccccatctctatttaaaaaaaaaaacaaacttaaaaatccagcaaatacataaagcacaaagccgacagaagaggtggagaaatcaacaaatccaccatcaaagtgggagaatttgatataattttaagttattggtagggtaaacaatccaaaaattagtacactgtagaaaatttggtcaacatagtaataagtttgcttattactatttatcagtatacatagtatactgatttatcagatacatagtatatggagccctagagcaagcaactatagcagtgtatctcaagtatttttacttcatgacccacatagcaaatgatatgtgtatataacacactgggctaattgtcagagttcagtttctgtccaaaaccctaagatctggagtgattaacctttcagcactcttagaactcacttgtttgtagcacactgattgagaagcactgaaagacttcactcctcaaacatacatggaatatttctaaaaactatgtattgggccgggtgcagtggctcatgcctgtaatcccagcactttgggaggccgaggcgggtggatcccgaggtcaggagatcgagaccatcctggctaacatgatgaaacgccgtctctactaaaaatacaaaaaattagccggatgtggtggcgagtgcctgtagtcccagctactcgggaggctgaggcaggagaatggtgtgaacccaggaggcggagcttgcagtgagccgagatcgcgccactgcactccagcctgggcaacagagcgagactctgtctcaaaaaaaaccaaccaactgaacaaacaaaaaaactaaaaaacaaaaacaaaaaaactatgtattagagcatgggttggcaaactatggcctgtaggccaaatctgcatgctgttttatttttttttatttttttgacatagggtcactacaggctgtcacacaggctggagagcagtggtatgatcatagctcactgtaacctcaaattcctgggctcaagcaattctcttgcctcacctcagcttcccaagtagctacaggcatgcactaccagacccagttaattaaaacaaatttttttttggtagagacagtctcagtatgttgcccaggctggttttcaaactccttgcctcaatcagtcctcctacttcagcctcctaaagtgctgggattataggcatgagccatcacgcttgactaatgtttttgtaaataaagttttctcagaacacagccatgccttttgtttatgtgttatgtagggctgcctgagttaagtagttggctgcaaagcctatcatggcctataaagcctgaaatacttactatctggtcctttatagaaagtgttttctgaccctgtactagactagcttgtctcaaaattcttcaatgaatttggaagttttctcaccacattttctgaccataatgcacttgagttagaagtaaataagcagataaacaacaaaatcctcatgcatttggaaattaaaaataacacttaaataattcatattcaaagaaaaaatcaaactggaaattaaaaaaaattttaaacctacagataactacattaatatgcattaacatttttagaacttagggatagttacaatgatatacattaaaactggtaagaggctgggtgcgttggctcacgcctgtaatcccagcactttgggaggccgaggctgggggatcacgaggtcaagagattgaaaccatcctggccaacatggtgaaaccccgtctctactaaaaatacaaaaatcagctgggcgtggtggcacgcgcctgtagtcccagctacttgggaggctgaggcaggagaatcgcttgaacctgggaggcggaggttgccgtgagccgagattgggccactgcactccagcctggcgacagagcgacactcttgtctcaaaaaaaaaacaaaacaaaacaaaaaaaaaaactagtaagagggcccagtggctcacacctgtcattctagctctttgggagactgaggagagaggatcagttgaggccaggattcaagaccagtctgggcaacataacgagaccgcatctctacaaaattttaataacaacaacaaaaaaaactggtaagaggcaacattgaatagtactttgtgggagtttattagcttgaaatactcataatagaaaagaaaattaatcagctaagcatctcactaaagagattaggagaataaacctaagcatagtttttttcccccaaacattattatatctggaatattgaatgcattcttattgctatttcaaagatacttactctaaggaaagcaattgaattaggtagttgaactctatagtagattttctttaatgagtccttttgttctcaacctacttaaataattctcatttgaatttatgatagtttcagatctacccaaagggtgacttaggaatttaacttctaaatctatttaaatgaaaggtttataatctttttgtcatattttacagtcgttagcgtttaacaatttatagcataggatttgggtttttttttttttttcattttaaagaagaagtttatttaagcaagacacttgactaagggaagactatcttggagttattattactagagtaatttatttctacttaaagacagattgccccacaagtaacagctacataaaaacagttgtaaaattgtccttggttttacaatgataaatgaaaaacattaaaattctctaattgaacaaggtatgcaaggatttttatattgttttttgctaaaactatgacagcaaaataacatcctggagtataaagataagagctgaatgagcaggccactaggggacaaagggagtcttttcacagaaccaatgcttcttttgcccaccccatctccatcgaagtcaatctaaacatattattggccatttagttaaaaaaagaaagaaaagaaaagcaatatgcttgtggacatacaccagttactttatgtgcagtaaaagagtaggaaggggaaggtgaaagaatagagaaaactatgtagtcaggatgtggtggaaccaaattgcaactttctttttttttgagacagagttttgctcttgtcacccaggctggagtgtagtggtggcccaatcttggctcactgcaacctccgcctctcagattcaagccattctcctgcctcagccttctgagtagctgggattacaggtgcatgccaccatgcctggctaatttttgtatttttagtagagatgggttttcaccatgttggccaggctggtcttgaatgcctgacttcaagtgatccacccgcctcagcctcccaaagtgctgggattacaggcgtgagccactgcgcctggccaaattgtagctttctaattgagactgtcttcttggtctggaagagcagagttctgcagtaaaataacaggtcccccttttagtagacatctccatgtctgctgctggaacacatcagttttgtcttaagcctcacttccaaatgtgcagatgtgtctggttcattgattggctgcctgtcaaattgaaacctgatctgcctcattggcaaaccgtgccccttacaataggctttcattggtttactaagcggtgtggtgcgtggctgttcatcttaaactgcaccacagtttaagatgaaccttcaaatgaacattatccttgttctcagtcttgactttccttgggctttttgtggaccctggtgagtgtggcagtctcctcagctgctgcttcacaaaagaggtaccaggtctgccccgaatgagtgagcccctaaacaggaccaggagtggcagaagaaagaggcagcaactgagatgtgttttttctaagctgaaaggctttttttttttttttttttgcaacacacctttaacactaaagtccaatatttatataattggtcaagtaagtggagctgttctagctataaatatggcaactctgcttgctcgtcctattattgacattattcctttctgtggtctgaggtgcctcccatgaaacttgcttctaggacactaggattgagaaccatcagcgtaacatatctgttacgctacaatagtttattttcatattttagctactttacatactcgggtataatgaactttattcatagcttctgaagcagttggcacatttgagatattttttacttggctaattgttatgctaaatcttttgatttctaaagatacatgcctttgctaagctttcttcaaatgttattatttttatttagattggatcattgctattccatggatgactcagaggatacatcctgggactttggtccacaagcatttaagcttttgtctgctgtggacatcttaggcgaaaaatttggaattgggcttccaattttatttctccgaggatctgtaagtatatatctgtgaattcccttcatagatcttcttttacttctattacacttttcttcagaggtttgcagtattatgattgtagctttgacttcagatgggtgactaggaactcatagagtcttactaagttccagttaaacactacattcattactttggataaaacccgtgtgtatggcatcttctgctgttttcatgttcaagccgatgttcagctctgcagctcagtctggaagcattgtgttaatttatcacattgcatttgggtgaatccctagactagtcttgcttaggataattaggaaaagttaactttcattgtatcaagggacaggtagaacaaaattgtccttttgtccaggaaaccattaaattcttcaaggaaaactttagttatagggattattttttaaatgtctaatttcagtaacaatatttgggacatatttatttttccttctgtttcctatcagaagtatttaaagttataagaaaattgtggtttttgcctttactaatgaataaataatcaattaaattcagttacttttttttggagtgattgatgttccagtattcttctaaacaaccacgggtacaaatgtgaataagataggaccgttgcagtccaagagcttgttctgtagtcctttcctttatatgattttttcccctgatttagaagtctataaagcaaagctaagtattacacactgataatggctgaataaatcaagagcaagagataggatactttgcaaatatgcatatttattaaaaatgtactttaaaatagagattaaaattctcgtattgaatgtagaataggtaagcatttatttgtgaaatactcgaatgcttcatgtaaatactttctgagtttgtatttttagaaaggaacattttggaggctgaggcaggagaatggcgtgaacgtgggaggcggagcttgcagtgagctgagattgtgccactgcactccagcctgcgcgacagagcaagattctgtctcaataaaaaaaaaaaaagaaacatatttattaaattagttgtgaaatatttttaatgaaatatattgaaaacttctgttgatttttcatgtactgatgtttttagattctaaatggagtttaaaattttgtttgtaaatcacaagttggattagaaatttaatagtagaagtgttgcctaaggactattttaggtgctgtgagtgaaactgtattttttataacaagaattttagttgtaagggacagcttaaatataattgagatctgtgaaaatgtattctgtctctatcaccttcagaacctgtgtatctcagttgaatgtataatttataaaaattattcttgttttaatttggtgtaatccagccatatccagtatcaacaaataagtctaagtaggctccttgacaaacttgaactggccacaagagagatcagatttcacctattaaaaaaccaaatcagaccacttacactgacagtctcttctgggagtcctcaaattaagaagtctatcctttgtgaaatattacactacccttgctagataaaacttttctaaaagtaccacttaatgaaaatctgtagacactaaatgcaatgaaaataaggcattgtttttttttctccccatttcagtgatcttggtatcctgggatattgtttttaaaattatcgttataattcctttgagaatttagtgaaatgttccctttaaccaacttaggaaaaattaatatctttgtacatgattttgagctgtaaaataaacattttaaactgggaataattggagtttagttaaagagataatgtatataaatatataacatagtagcagcatataattctgtcttacacaagatttttctgaatagtataaacagttatgtagcctatctaggagtttgtgaatagagtttaaaattttgttttgaagctgcaaatttgattagaaattaaacagtgaagttattacttaaggaacttcgttttagctgtctgaacaacttactgtataaaaatctttaaacattctgtataaatatgtgataagatatgcaatgaccttaattttatagattagaaaataaaaacacactcattaatttacataactgacagattaagtgaaacttctcttctgatcacgttagcagaatgccaaatcttgtcgtggcactagaattagacggtagttttgataatacatgatttgactatagacatttgttgaaactattggtagttttaatcactcttgtaattttcaaactatctaacgggagaggattatccatcctgttttctagacaaactgtttcatctgaatgaaatatattcctagagataattatcactacttcatcttttggttttattttgcacatagaattatagttcacaatgactttctgaagctctaaagttgcagctgtgagcttctttggcctgtagggactgggaaaaagcacccccgtcctcccccaagcccccccaccaaaaaaagttaaagtgtttttaacaatagctgtgggctttttgtagtttcagaacttaggagttgcccaggctggaatgcagtggtgtgatcatagcttgatgcagccttgaactcctgggttcaagcaatcctcccacctcagcctccagagtagctgggaccacaggtgccaccccacccagctattttttttattttttaatttttttgtaggtatggggtctccccatgttgccctgcctgtctcaaactccagggctctcaggtgatacccaccacccttggcctcccaaagcaccgagagtcactgtgccaggctgagtttaaaatttcttgagttggagtttatggctattttttccactagttattaaacatgtatttttgtataaggcactgtattacattttgtggggggattcaaagctaaattagatgagacgcatcatctattatggaagatgttacttaagaagaaatgagtgtaatgtagcagagaattagataagggacgtatgaatacatataaatgctgttgaagttctgaagagagagagtgtttagagaaattagaggagtctttgtgaaggtatcactagaacttcctatttttgtggaatatatagtagattttggtgtgatactgtggatttggacattcactcagagaaggaatgagggaagaatggtggagaagaatggcattcacagtacaaaaagcaactgtgacttttaaagaagttaatatggagaagtggcaagtcttttcttctctcttctcttctcttctctcttctttttcttttttctttttttctctgtcagataccgttgtaaagactttgcttttaccggaaactgatacgttgggtcatgtaccctggccagtcagttctctttattctaacacttagccgatcagttagatttccacattccatgatatgtcagttttggtgacccttatttttccacctggtttataaagggaaagaatgtgatatgtcacccaggctctggagtacagtggcatgatcataggtcacagcagcctcaaagtttccagttcaagcgatcctacttccttggcttcctgagtatgtggcactacaggtgcatgccaccatgcccagctaacttttttgtagagacagggtctccctatgtttcccaggctggtcttgaacccctgacctcaagtgatccgcccaccttggcttcccaagatattggcattacaggcatgagccactgtgccggcctgaaaatttctcttttgagatggcatcccacagaagtatacctgcttagagctaacactggtaaaaagactatttaaccctattgccttattttactgtagttgagattgagttaaactgaaagctgaatgacctgtcctaggtcatactgttactttgtgccagagtcaggatgagcaaatggatttcctgcctgctagtctagtgtcttttctatttattgtgctgtaacatacagttttaaatttgtatttttatgcccaatggacatggtagctcacacctgtaatttcagcacttttgggaagccgaggtggggggattgctcgagaccaggagttcaagatgagcctgggcaacatagcgagactccgtctctataaaaaaaaatttaaaaattagctgagtggtgatgtgtgtgcgtgtagtcctccttgtgggaggttgaggtgggaggatcgattgaatctaggaattcaggactgcagtgagccatgattacaccactgcactccagcctgggtgacagagcaataccctgtctcgaatgaatgaatgaatgaatgaatgaatgaatgaatgcccaaatccgtaagctatgttctgtatagcagctttttcatcataggcagtttttactcttatcagtggacaacctacaaaattaactaaacacttaaacaattaacagaggaggccttgttcagagtgagaaatcattaagcatttgttgttgaaatttcttactgtactctgttttaattctgtttttttttttttttaatgttacttgttttagtttggattcctagttgaaaagggaatatgattcctttaaaacaaagatactctgctttaaagcaaaggtatatcatcctcttcatggtgattgccatggaaacaagacaatgtaaatttattcaaatagtacacagtttttatagttattgatcatgaggggaagggacagttaatccctactgatcagataaaacctcattgtttcatactaataaatggtttttttatgcttatgaaaggaaaagccagaagtgtaatttttagtgtttagagagctagtgattctagttagggaacttaatacctttgaagttattagtttgcaagcaatagaatctactactaccaaggtgacccctagcagatgtagagtaccattaacaagtgttccagggaaggaaagccaactagataccaagtcatgctttttactcttagattaagaaattcaggttgagttaaaggatcagctgttaactaataaaaagcagattaatattacagagccaggctctgtcctggttatggacttaatcttcacagcatcctcaagagataaaaatgaatatacctgcatattagatgaggaaatagaagataagtaacttgccagagctatgacgtgaactcaggtaatgtagcttaagagcccccacatgtatgtatattgggtgtgtgtgtggagggggtgcgtgtgagtgcttgtgcatgcgtgtggtataataagaaaaaattagcatttatgcctgtaatcccagcactttgggagaccgaggcacgaggatctctcaaccccaggagttcaagaccagtctaggcaacatagcgagaccctacctctacaaaaaaagttttaaaaatattagcgggcatggtggaatacacctgtagtctcagctgcttgggacgctgaggtgggaggatccttgagtccaggagattgaggctacagtgagctatgatgacacctctgcactccagcttgggtgacaaagagagaccctgtctccaaaaaaaaaaattagaactagttatctggaggcctgtgttctagtcctagctttagtacggctacacagtgacacattaggctaccatttaacatctttgaacctctgataatttgttaacaatatgggtaaaaatgactaagataaatcaaagagctccagcattccctccagctctgaaattctatgatgttttatcttattttacttacaaaaataaattatattatgtatatttaaagtatacaatttgatgttatgggttacctatagtaaaatgattactataatgaaactaattaacatatccatcatcttatattgttaaccatttttttgtttttgtggcaaaagcagctgaaatccactcatttagcaggaatcccaaatacagttcagttgtattaattgtaattctcatgttgtacattcgatctctagacttgtttatgctacatatgtttgacttttaaacattctactcaaatcaaccctaagtcagggttagcacagacaggacttgttaacaaggtagaaggtgccacattgtacctgggtgtttatatttctctaaatcttgttctgatcatattttaataaatataatcatcaggacaccaaaattcattccttagctattaaaaaattctattctattttattgttaagatttaggagagcatggtacagattctcttaactatacctatcagaagcctatgttttaagtccaatgtataggcactgctctgtttgtctctggtgggaacttaccctgctttacctaatttcatcctagcttcctttttgtgaaagatcacccttgcttagcctattttttggcaaatctacaccttggaaatagtagtaaatgacataagcatattaatatttatgatgtgatttatttttgttttcaagtcatatactggggaagattctcaaatattaaaacaatgtatctttacatttatgtatgtcgttcttgttctgttttagaaggcttgtatttgcatttttaacattccaaaaggtaaacctgtaatcataatgttttcatcaattcaataaaaccattacgtttgtaatagagagccctatagttgccttagttaagtttgctgcaactcattttatatattcttttaattttgatccctggatttttaattgattattaaaccttcattaggatatatatgaaatgtaaaaatattgagttataatctaccgttttctaaaattttatactgcatttttatatagaaattcaaattgctcataatcattctagtgaatttaagtagaaaggtatttattactaggtattaaatggcttataatattgttgacaaggttccactgcaaaatagttcaccaagggagctgtggcctcttctgtgatcaagaagccatctgtcaacttgggaagcttccactatagcacctaaccccagactacattgagtaggaagctgtaataatcaggaagcttctacctttgcatgctctgcaaaccaacgtgaacctgctgtaatttgtaaccacaaaatggatgcctgttgatacttacgaagctcatcattgtatgctgggttctttgctaatactttcttataaaaattaaatacctccacaatcatgcatgctagcagaaacagcagaggagtagccttagcctcacttcctgcttatacctgtcatgcaaatatacagaacccagaaccctagctgaaagggagtttgagaactagtatttgtattgtcccagattctgcagtggaagaattcatagtggatggaagttagaatgacccttgaattacaatcggccacattcatcacaaatacattaaataagagtaatttgccataaagctctatgtttgtatacttctttgttttttttttttttttttttttttttttttgagacagggtctcactctgttgctcagtctgtagtgcagtggtgtcatcatagctcactgcagtcttgatctcctgagctcaaacgattctcctgcctcagctcctgcttcagcctcctgagtagcggaacaacaggtacacaccaccacactttgctaattttttattttttattttttgtagagatgtgggtctcactgtgttgcccaggatggtctcgaactcctgggcttaagtgatcctcccaaagtgttgggattacaggcatgaaccactgtgcctggcccatatactacatatatttaaaagtagtatttaaatgtgtaggatgaatgaaagaggcagtaagagaacaaagtgaatgaaaaagtatttctatatgaagtgaaagcaggagagtcctctctgttagagaacaacagaattgcatatgacagactagctttcttaatatttctagaacttgatggctgtgaagagcgtcccgtaggaattctcccttcacttaggaaaacatacctcaaaaccatcagctgtttagcatgcacctgcttttcctggtatatctcagtgaagcagctaaattgtaaatgattaagtaaactttgcagtgtatcatgtgcaaaagcacagtaaaaacaaaaatgcattggaagctgtgagttgttgcactgcactcatggatgaatagctgttggttcgcattgcgtttttttgttttgttttgttttgtttttttgagatggagtcttgctctgttgcccaggctggagtgcagtggcgtgatctcggctcactgcaagctctgcctcccagattcacgccatcctcctgcctcagcctcccgagcagctgggaccacaggtgcccgccacaacacctggctaattttttgtatttttagtagagacggggtttcaccatgttagccatgatggtctcaatctcctgacctcgtgatctgcctgccttggcctcccaaagtgctaggattacaggcatgccgcattgcgttttatataattctcatggttctagtctcgagctgtaggattttgatcactgtttcaaacaataatgtgagtttgctaagaggtctaaataacaaaagctaagtgttccaaacacatatccaaacctatacactgggcaatgcatctgaattatatgtgaaatttcctgccattatttaagacacaaaaggaacattattttgataatgtatttatttgtgagtggagtgttcagaatgagcacgatgggtataacatttttgtaggtttttaaagttgaaatttagtgtaaatccaaagaatcaatagacaagtctgtgttttacttaacctatatgtttaaattagcatttttagatactgattttattcctaatttcagaattctcagcgtcttgccgatcaatatcgcaggcacagtttatttggcactggcaaggatcaaacagagagttggtggaaggctttttcccgtcagctgatcactgagggattcttggtagaagtttctcggtataacaaatttatgaagatttgcgcccttacgaaaaaggtaaacggtgtaggagtctgcctgtttgacttaattttgtttcccactccacattaaaagatcctttttgcttttaatagggtagaaattggcttcataaagctaatacagaatctcagagcctcatccttcaagctaatgaagaattgtgtccaaagaagttgcttctgcctaggttcatttttcagtttttttcttgtaacttctgcattttttgttgctatttatgtgattcaaattataccagtttataggcctctcacaagtaaaatgaattacctgtttgtttttgtatgcctattttagtcagtttgggggaagggatctgtgaggaaaggataagtcatagagcacttttcttttttaagagacagagtctctctgtgttgctcaagctggagtgcagtggtgcgatcatagcttactgcagcctcgatctcgtgggcccaagtaatcctcagccacctgagtagatgggactacagacatgcactactatgcccagctaatatattttaattttttgtatagagacagggtcttctagtgcttcctaggctggtcttgaactcctgagctcaagtgatcctcctgcctcagcctcccaaactactgggattacaggcatgatccaccgctcccagccagaacattttcttggttgatgggaagtagctgaccatggtatttagaaaacttctttctcatcgattaaagaagcagtactgaaatcaatgcggaggaatccatatatcatatttacttctggtgtgtagaagtggaaagggaatacatttgttgcttacttttttgtacctttacatgtgattgatcacttgtgagttttttctttcaaacatcttaaagcttccagagctttttctagaaaaaaaaatcagttttaagaatcaccagttctaaaagggtaatatcttattcatctttctgagaatggagtatcatgattcatgaattagatacttgcatcttaacatttgaaataatttaattttattattttttagttcgaaaactgtatcttcgggcaccaaagagcattgttataatcaagtaccagttgaattaagtacagagaagaaggtttgttttaaagaaattgttctgatttatttcattctttattgattcaaattctgtttaaaattttatattttaattcctttccaattaaagagaaaatggcatatataacaaagcataaaattcggccagggaagtgatgtgaacagactaaaatttattgtatataatttctggggctaataaagaattggaggtatttgagaaaggaattaatttgggttcttttaaacctatctgctaactcatttggcttagagtagtcacatgttataatacttatagttgatcaaaaaattgattcctaagtgttcttattaaagacacacacacacacacacacacacacacacattctctctctctctctctcacacacacacacatgcacacacacttatgtactttcttgctttttttgacctaagatcttagataactattacagattaaatactaatccactggcagacttcagctaattagaacactggaataataggcaagcatagtgaattacattttctggtgaactttttctgctttattgaagtatgcagaatgtaaatgaattgtttttataactttggcacttgctgtatcttagaacattcttttgatgatttattttctgtagttttgggagagataagacattggaatgcgtttctaactacctttagaactttagaaactgataatttaggaggttattttcaggtgattaatttgacagcttgattaggcaaagaaaaaattgtgattttgagatttttgtttcttattttcttcacatttaaaagttttttgaaactttttttaatggacctttatatgtttaaatgcagtctaacttggagaagttatattcttataaaccatgtgataagatttcttctgggagtaacatttctaaaaaaaggtacagagttccatatttctatgttctatacttgctttatgagtacttttttttctaaagagaaagaactgtcagatgttgggctatttcattggcaaaaggaagttaaatttaaaacataagcttttcagtattagaatgatcaaagtgagctataaaagaataatgttaatttaatagctaacacttcttggatattactgtttgtcaggcattatgttaaatgctaagaactttatatgtgatatctcatttaattcttacaagagtctaacagctgttactatttatcgccattttatagttgaagataccaagggttaagaagttgacaaacttgttcaagagcatacagctaatggccgagctggctttcaagtctatatttgtctacctctagcatcaagacactatttatttttctttgtatgaaatatatacaggcatactttgttttattgtgcctggctttattgtgacttgcagatattgcatttcttataaattgaaggtttgtggcaaccctgcgtcaaacaggtcatattagccccattttccaatagcatgttctgttgtcatgtctttgtgttatattttggtagttcttgactggccattcaccatttctctccctctcctcgggtctccctgttccctgagatacaacaaaattgaaattaggccaattaataactctataatagtctctaagtgtgtttttttttttttcgagactgagtctcactctgttgttcaggctggagtgcagtagcacaatctcggctcactgcaatcttcgcctcccgggttcaagcgattctcctgtcttagcctcctgagtagctgggactacaggcgccccccgatcatgtctggctaatttttgtatttttagtagagatgggtttttgccgtgttggtcaggtggatcttgaactcctgaactcaggtgatccgcctgccttggcctcccaaagtgctgggattacaggtgtgagccgctgtgcctggcccatctctaagtgtttaagagaaaggaagattcacatgtctctcaatttaaatcaaaagctaaaagtgattaggcttagtgaggaagccatgtcgaaagctgagataggccaaaagctaggccccttgcaccaaacagttagtttgcaaaggcaaaagttcctgaaggaaattaaaaatgctaccccagtgaataaaacaatgataagaaagcaaagcaggctttttgctgatatggagaaagttttagtggtctttataggagattaaaccagccacaacattcccttgagccaaagcctaatccagagcaaagccctaactctcttcaattctctgaaagctgagagaggtgaggaagctgcagaataaaagtttgaggccagcagaggttggttcatgaggtttaaggaaagaagccatctccataacataaaagtgcaaagtgaaacagcaagtgctggtatagaagctgtagcaagttatccagaagatctagctaagatcatcgatgaaggtgcctgcactaacagactttgaatgtagaccaaatgctttctaccagaagaagaagctgtctagtactttcatagctagagagaagtcaatgcctggcttcaaagcttcaaaggacaagctgactctcttgttagaagctgatgcagctggtgactttaagttgaagccagtgctcaattagcattctgaaaatcctagggcccttaagaattatgctatatctactctgcctttgctacatacatgtaacaacaaagtcttgatgatacctgtttacagcatggtttcctgaatactttaagcccattgttgaaacctgcttagacaaaagattcctttcaaaatgttattgctcattgacaacacttagtcaccaagagccgtaatggagacatacaaggagactaacgttgttttcatgcctgctcgcttaacatccattctgtagctcatggatcaagaagtaaattaaccttttaagtattattatttaagaaatacagtttgtaatgctttagcttctgtagatagtgattatcagagatgggtttttaagaggttttccagaaaaccttctggaaaatattcactattctagaagtcatgaagaatatttgtgattcaggagagtaggtcagaatatcaatattaataggaatttggaagaagtcgattcttattaaaatcaagagtttagtgatagacatactgagtttgggatacctgtggagtagtccagaagttaatttaaatatatgggcttagtgtacagaagtgagcagggtgcttatatatgaataaatattattttaagatatatttaaattttccttaaaataatacctatacttgatataaaaagttaattggaaattagtggcttatgacaagcataccagcccacactcttcccaaacccactttgctcttattcatagaagctgtcatcttcaaatcttccagctgatttccctggcgtgtgccttcttatttctgaatgacacgcttagagtactatttttttgacttagcaattttagaaattttctactcatctcctattatggtagatttcccctccttcattcctcctccaatataattatatttcgtcatattaataatttgtttatatatatttttaatataatatgataatattgtatttatattattaaaactacacaaatattatatacacactactaacccaaccgtgttattatggccaccactacctttatttttttccttgtgttagtgattgtctttgttttattttcttggttttgagtattccttttactaattttcttttttcctatttcaatctctcattatttgtttactcatttggagtgttccttgacttttatcccctcttacctagtgacattttaattttagttatcaaatttttaatttctaagaatgcttcttgttctcttcttgtttcttcttccccaccagccaaaaatctatgatgttatagcaaggatcatacattgtttcccagtaggttaagaaaccttggttaaaacctgttgtatcccagtaagttaaaagacgttaacgtgtcatcttcagtatggatgaaagaatattttctttcaaaagcagttggttgaggaagagaatgggacaaatgctctttttaaaacaccaattttgtgatgaactcaaattgcaattttaactttaccattataatgaatgtatttgatccaaaatgtttaaaatctaggctgttgtcatttaaataacaaattaccttactggtatcatgaagaataaatgtttgtactgatttggaaagacattctcatttaggggatgaaatagaaagtcaatgaggagaaagaaaagcttttattatttattttcttttaaatattttagtatcatggtacagtcaccagaaaaagcttacagttcctcacagcctgttatttcggcacaagagcaggagactcaggtaaggcttttgtaaaaaggtaattagtttatgataggatagttatgattctatgtatgcttaaaattctgtattttgccagcattttaaaaattgttcttaagctaagagtctgagtttatatttcagtttatattcattctaaggaaaaatgtggtatctgaagctctaaaaataaaggactagatcttttaagtacactttaaaaagtgttgtttctttgttttttgttcagattgtgttatatggcaaattggtagaagctaggcagaaacatgccaataaaatggatgttcccccagctattctggcaacaaacaagatactggtggatatggccaaaatgaggtaaactatcttttgcatgtgttctatttatttccttctaacaaaatagatttggaaaatatatctaagttgataatatgaccatagcttccactgtcacatctgggaggtgactcagattccccctgctgcgatgcttatctctttgccaagctttagtaccgtgtttctgtatgaataaaaaccagttacgttttcagcaatcatattcaatatttataaaatctaactcattatttacccaccctgcattttatccaaatgccgaaactcctctttttggattctttatttttgattatcttaccatcacatttgtagtcagaggttcctaatgcttaaaacctctgatctgaattttctctcctccaatataaaaccccttcgtcttcctcttcttcttcttcatttttttttttttttttgtctgaagacttgtctcactgtgttgcccaggctggagtgtagtggtgcgatcactgctcactgcagccttgaccccctggactcaagctatcctcgcacctcagcctcccgagtagctgggactacagaacatgccaccatgctcagctaatttttgtattttttgtagagacagggttttgccatattgcctaggctggtcttgaactcctaagctcaagcaatcttcccgcctcagtctccaaagttctggcactacaggtgtgagccactgtgcctggcctctttttctcatttaaatacttttcataccttttgtaaaacgggttccttgttgcctgtctatgccttcctcctccttcttaatgacaccacgttaattctgactgttttcccttggcctgttgcagaagcctcttaactattaacccttcattctctctctctgtttcatctgatatatgagtaccaaactaaatcttcctttatcatatcttacttctgcttaaatgttttttttctagcttagaattcaaggccctctatttatgaacttaaacttacttttccctctaagttacagaatttgaaatggtttatcttacctggattgtttatcacttgttgaagatccattttcaacttccatatatttatttacagtgttgcttctccttgtagtttccttgattcctcaaaactccttttaagaattcttgaagatctcgctttattactatttctcgctttattactgtaaagactatgagaaggtctttcatgatcttatcagcaaagtaattcctctctcttgaattcatagaggactttcagatgaattctaaagatgcttctgtagcacttaccacacaatgctatattttatttttttgtaattagtggtaaacaagtattattatatcttctagattttaaactccaaataaagatactagctccttacctttttgtgtgtctcctgtagcacctagcacaatgcctcataaacaggaggtgatcattaaatatttagaagaaattatttcccaagaatagttgcttggtaattgtatttgtcttttacttccttttaaaaaattgtttctgtcactaaattgcatccaatagatgttacttgagtgcagaattttctaatgacattacacagtgctacatctgacactaattcttttgttaaaaaataaatattctggccgggcgctgtggctcacgcttgtaaatcccaggactttgggaggccgaggcgggcggatcacgaggttaggagatcgaggccatcctggctaacacggtgaaaccccgtttctactaaaaatacaaaaaattagccgggcgtggtggcgggtgcctgtagtcccagttactctggcggctgaggcaggagaatggcgtgaacccgggaggcggagcttgcagtgagcggagatcgcgccactgcactccagcctgggtgacagagcgagactccgtctaaaaaaaaaataaaaaataaaaataaataaatattctaagaccatactttaatagaggtgttttttttttttttttttttttttttttttttttttggtgatagagtctcactctgtcacctaggctagagtgcagtggcgcgatctcggctcactgcaacctccgcctcctgggttcaagcaattctcctgcctcagcctccggaatagctgggactacaggtgcgcgctgccacccccggctaattttttgtattttagtagagatgaggtttcactgtgttgtccaggctggtgttgaactcctgagctcaggcaatccacccgccccggcctcccaaattgttgggattacaggcgtgagccacagtgcctggcccagaggagatatttaatgaaaaataataatcattagataggcagatttttagaaggagggcatcgaatgggttcttggatattggacacaataagaaatattgagctaaaagtctgaaggaattggcagatatactgttacaggtaaacactttgtagaagaaaataatgaatgagactttcttttgagattttcttagcctcttagttgttcccagttaaagcctcatatttttccttttcatgacaataaaaataataataaaatcagtaataaagtgaatatatgagatgttaacctgttcctttatgacaatgtcctgtttaccaattaacagtgtgtttttgtggtgatgggggcaagacaaatctttaaatggtggaaagcaaagaaagaaattataaaacatgattagttgtattatacgttgtttttggttgttggaaaaactatacatttattgagagaatcattaggaagctgaacatcagctatattgctggagtgatactgtttcagtggtttcttgacctttttgttgttgttgttgttgttgttaaacacagaccaactacggttgaaaacgtaaaaaggattgatggtgtttctgaaggcaaagctgccatgttggcccctctgttggaagtcatcaaacatttctgccaaacaaatagtgttcaggtaaaatactgtggtttgcaggagctcttagagaataagcattttttgtaaccatttcaaaagtaccctccagaagcaacatttgctcactttatttgcatttccatactggacacttagaaaatgaattaaaattgtttttacagtcaatctgttgtaaaaacatgtcagttatctacttttaaagatgatactaaaaagtagttgtccaggctgctgatgtctttctatttcattgggaggttttgtttttaaattggaaacattattttaggttgataaattataattttacattcaaatgtggtagttggaatttaaagctggaaagttatccttgctatgagttggtcaggagctcagccactttcttttggtttagcatcttctctaatctccctccccttccagtaatgctgtcttttgatagtaagtggatttcatattattctcttcagttttaatagtgtttccttcatatccttttattattgcttgttctgccctaagtgaccatttccagaaatgtcatttaggattttctctaaactccacgtagcagactctataatgcatactctgcagaaggtgaggcagtgggaggtagaggggagactactagactaggagtcacggaatcaggactttagttcttccttacagttgttcacctggtgaacctgcacatgtcctttaatttccttgggtctccatttcctcagctatacaatggaaatgacacttcctcccccacatccaggaaacaacagatgacattagaaaatagaagacatgggataagtataaaatgttgaaagagttaaacacattcaaggcaatattaagggattattttttacttccaagaagctcctggaagctttgggcaggcacagttggatcctactttagaaaaatctttctctaactataagtagaaaacccttctgctttttgaatgtagcatttccctcttttgatatagagtatctttggcaactttgaattttctttttcatactcttatataagacatcatgtgaaaattcttatttcttactgagtttttggaaatgaaattataatgtcttaatagtttgagaaagaatatcatacctaccagcggtaattgagtaagttccctctctttggacacttgaaagtagtatcttctttcatgaattagtgatattatttaataatgaatgagtgatctctcctaactccccttcagaagaggaaaatgaagtaggggaaaaggtaaattccccaagggataggtatgaaacctttatgaaccttctggatagagaagatgactgctgatttctgtgattagaaattatacttgggttattctgcaaattgaaatgaattatttaaaaaaaaacaactttaatgtttattaagcaagttttgttattcatgagtttcattagccttttattttttttttaaattttgaagtaaaatttcttgctgtcacaatacacattaaaaattacaaatatgacacatattaaacacattaagatggccgaataggaaaaatatgctaaaatatttttatataaatacattttttgagaattttgagaatttctggaacaaagtaatgatataatccataaatgtacaattaaagagtttaaggatatccaaaatacttggcaaagtaatctgaaataatactcttaggaaggtagggcaagaatgtgattctagtaagcaaaaatgtgatcaaatcgtattctagtcccagctactcgggaggctgaggcaggagaatggcgtgaacctgggaggcggagcttggagtaagccgagatcgtgccactgcactccagcctgggcgacagagcgagactccatctcaaaaaaaaaaaaagactatatgaacatgtatggcataaatatgtacaaatattatttattttaaaaaaattcaggggtagggacagggtagttagaaaatatctaaggatgttcatgaaataatactggctatgaatgacagttgatgaaaccgggtggtgcccatcttattccctcgactcgtgtatatgtttgatatatcccacaataaaccttaaaaaaaaaaagatgagtggtcaattataggaagatataaatagaaaaggcaataaggacaaaagttggcaaagcttacctaagcactcttcagataaaaagacatttttgctaactagatttgaatattatagtttaattgtcaaggaaaatgcctcaacttaatctttgttaagagactacttaaggcactatcagaagttccctcatggcaaggtgcaatccctcatgcctgtaatcccagcactttgggaggccaaggcaggcaggttacctgaggccaggagttagaaaacaacctgggaaacatagtgagacccgacctctacaaaaacaatttcttaaaattagccaggcatggtggtgctagcctgtaatcccagctatttaggatgcttaggcaggaggattgcttgagcccggggatttgaggctgcagtgagccatcattgtgccacaatactccagcctgagtgatagaaaaaaaaaaaaaaagtgtctttgttatattccaaacttgttctcaactttcaggtgagctggcttcctgtataactcttgtataggacagaacatactggttggggcaagtgaaactgtctagttgtatgcctcataaattaatgaatttcctttctaatatatacactgatatttatacacacatacacataaaaccaagctcaatagatgggtagtgcagctctattccccaaaacccaactaccctgtaacaagacacattagacttttgagattgcaaggatgaggactgaaatgctggcctagaccatggtgttgccatagtggggtgaccagtctgaatagccaacaatgcttcctcagtaaatacccattttgtcttggtgggatttctataaattgcaaaatgcagctattatgaagctgtaaaagagaaacagaaacatgtaacacctgggactgttttattaggcccaccgtatgctcagaacatgaaatctccactgctagggttatttgattgaaattatcttttgtgttgatgtgagagtttagctctgagattcttccacatgtaaaatgtaatcccccaaagtatttggcaagcacattttattgccttgggtcagataattgaaacattaggcatcatatatatagcatgtaaaaagtaaaacagaaacatttatgtttctcaccaagcagtaaattagtactcaactaataaatttcttaaactccctaataacagaatatggaaacaaaaaataaatctttccaaaagaagagctcatggacacatttcctcatatatgtatacataatatagtagaacacatgataaataacctataaaaatgataccaatatcattcatcaagagacgaggctcttctttaaattattaatttcatctgttacaggttttattatgactgtagtatgctgttttcatctaccttttatgtgtagttaaaaaaatagttttctatctctttacctttatttcagcctttaaaaagattccattattttttcattaatcttgtttttcagtttttcccattttttcttttaaacatttcttaaggaaccatatttaagattttatagaatacttagatttctagttgggatgtatcatttaaaattagatatgtagagagagtgttatgatatatttccttacgatatattagtggttatagtacctaaatttgaatagtgattctgttcattcattcattcattcattcaatattcacttccaggagattggggacttatttaaagacagagtagttcacattatagttcctttttttagtccttcttattcgttaaagaaaagactaggaaatgtttgttattacaaatattttattaaaattttgtgtgctctagcattattttaccttttaaaatcaatatgttaaaaatccaacttctttttgagctccccataaaaagggaattatttgttgcttatgggtttaacttgtgttatttttttcttaatggctaattatcatacatatattctattattgtattgatattactgatcatttgtgctacattaaaaattctgtagacagacctcttttcaagtacaaaacctcaagaagaacagaagacgagtctggtagcaaaaaataaaatatgcacactttcacagtctatggccatcacatactctttattccaagaaaagaagatgcctttggtaagtgtgactttcatgttacagggaatttttttagtttacttaaacttgtgttttatcagctttttagtattaaagttctgacttgggatcaatttcctccaaccctacaataaatctcagtttatctttaattttaaaagagaatgttgttttctttttctgttaagcctccctgttaagtaatagcagcaagtttagtttggccatgaatatcttctagagattgtatcggggtactgataaacacatttgtagctcagggatactgcatcagccatattttaaaatgggactaacagtttaaaaactataaatattcacagtgttaagaaacaatctcaagatgcattaagaaaaaggaaggtgcaaaacagaaaaacaaacgtaaacgtgtgtgcatatgcatgcttatatagtcacatattcttgtatgtgtacaaaaaatacacactggatctctgcaagcatagccaagcaactggaaatatgtttttaaaaacttgcttttcattctatctcttctagtactgttttgatgctctttgaaaacaatctaattgctgtaacaaatgaccatacgtaggccgggtgtggtggctcatgcctgtaatcccagcacttcgggaggctgaggcaggcagatcatttgaggccagggatttgagaccagttggacaacatagggagaccctgtctttactaaaaatacaaaaattagctgggcgtagtgacgcatgcctgtaatcccagatacttgggaggcggagacatgggacttgcatgaacccaggaggcagaggttgcagtgagctgagattgcgacactgcattccaacctgggcgaccgagcaagactcggtctccaaaaaaaaaaaaaaaaaagaccatatgtaatgtttcttcattgttctaagataaatctttaaggctgttgaggttttttgtatacaaaatggagagtaagttttaatgggatgggacaaaatgaggcttacagttgagtttaatttgagttcacatcctgttgacattaagttgatttggaacaagtgatatggtccaatgcctgcttttctattgtctgtggttccatccactagtgcctgtgttacacacctcttgttcaggttttatcatttaaaataaataagaataaacagtccatagcttatcttacttactgaataaatgctctaatttgacagtcatgtttcttaaagttccttacaaaggccattgcccaagaaaccaaataattccattatactatttttgaaatagaacacataataaatgggaattttaagttcagtttcttatgtaaacaataacttctatgtacatgttaaatatgcctgtatatacctaatttgaccatgtatgtatagtagaaatgaaaacagttactaagaaaatttgttattggctccaaattttctgaattaagtgtattctaatgctcagccataatatggggtttcatgtgttagtttatgtattcatggttaaaaatgtgaagactgttatatcttcatttgtgtcttttggtattatttggttgtattttattgtgtgatatggtggtataattatccttacctcccaggagtttgagagggtcttgccagttaaccgcagaattaaacatgcttaggactaattaatcaggagcaatactacaattagttggaggtaatttgaaacctggtttcaaataaccctgatattatgcacacatggtgcacacttttctagtagacatttaatgaaagtaatttaaaacctacctttgaaggatgaaaaacattgccttaaatgctctattctgtgaaagtatcaacatttatgcaaatacagtctaaattcagactttgaaaatgtattgaaagagaggatcatgaaataagttagagctgagtgacaaagctttctgagtgtttaaaagaatgttttacctaataaatatctgaaatgtatttggagccacatttgtttaaagaactgtataaatatgtagcactgttcatgtgaagttcaatagtaggaaaatgctgacagcccttgtggaactgtggttattattattttatgaatagagccaatttcaaacacctattagagtcttctcaggaacattttatagaatgcatctggagccttatgttatctctaagcattttaggatttgtcttcttggaaattcatgtaaccaaaccaccatgtgttatttcaagtgtatatagtattgggttacagtttactatgttttcagaaggttgtgacaactattagacttacagagaatgacttctctgccactaacggctttctaaagtgaatagagaggggcgaggattgaattcttcggtaaagctgggtgattttgttttattcaatacagtataataagtataaaaagtagaacctatagagagctataatgggggtagttttaaagaaattctgaaaatgaaaaacttaagtaaaggtttagttcattgtttatttcacactgagcatttactacctgaatgttttggacattttatttccatgactggagtggacacttttacaactcactgggttctttgctgatctttctctagaagagcatagctgagagcaggattctgcctctcatgacaattggcatgcacttatcccaagcggtgaaagctggctgcccccttgatttggagcgagcaggcctgactccagaggttcagaagattattgctgatgttatccgaaaccctcccgtcaactcaggtgagaggcatggcctagctctgcacccttaatgacttgatgaagtaaacaagcaatccactatatttttcactgttaacagcattaatcctttatgctattatgaaaaccttacttttgtgattctttttcttgttttaggaaaacaatctttcttcccattatcactcagaggaaagtatactgagaaatttttttgttttgttttgttttttgagacagagtcttgctctcttgtctaggctggagtgcagtggcgtgatcttggctcgctgcaacctctatctcccaggttcaagtgattctcttgcctcagcttcctgagtagctgggactacaggcgtgtgccaccatgcccagctattttttgtattttttgatagagacagggttttccatgttggctaggcaggtctcgaactcctgacctctgatgatccgcccacctcagcctcccaaagtgctgcgattacaggtgtgagccatggcacctggccaatacactgagaaatttttattttccttttcagcttaaggttacaacttccccaccatccaaaacgtgcactttcattttttttctaatttctatctcatcacttgcaaaaaccatatttttctccacattcattcccagtagcttcctgactcctagttcttccctaaatccttctgagtccttgtcattggtttcgcttgagtagcctttctaatcaacacagtcattggtatcagttactgtgacatggaagggacagaccaagttctgtgggccgctacgtagaaggatttcctgtcactttgctgcagaacctcagctcgcggagagcaagcccctttgcttgccctgtagaaatattttaaattattatcctttttttttttaacagaagtaaataggagatacgttagaggattttctctcctagatgtgtaaatacaaacttggggtcttataactcaataaatctgataaatttcttttgactgttaggatagagcagtggccataccaatagcctcatctccaaagctgcagtgaagatactttttactaccttaaagtctttcccatttgtgaacaacttgtgaacaattccccccaagaatttggaagatcactctctgaaagcacagtcaatactgtacttaaatggatctgagcaaaaataagtcacttagaagacaggattatttctagacttgagtgtgacttgactgaaggtctaaagaacaaacagctccttcacttccattgatcacggtggaagcacagggaaaggacagacacggaggcaagttggagtagtgctcatctaagttccagggatgcgggggagtggccaggggacttcaggtatagtaaataaataacctatttataagttatgtcaatgtcatgtttgaaatagaaaaccaaatactgcatgttcttacttacaagcaggagctaaagttggtgcatatggatataaaaatgagaacaggccgggcgtggtggcttgtgtctgtaatcccagcactttgggagacctagatggaaggattgcttgagctcaggagttcaagaccagcctgagcaacatagtgtgacccccatctctacaaaaaataagaaaattagccagacgtggtggcatatacctatagtctcagctacttgggagtctgagtcaggaggagtgcttgagctcaggagtttggggttataataagctgtgatcatgccactgtgctccagcctgagtgacacccagagtgagaacctgtctcaaaaggagaaaaaaaaaaaagtaacagtagacgctggggactactgaggggagggaaggaacaatggttgaaaaggtgggaagggacagtggttgaaaaactacgtgttgggtactatgctcactatctgggtgatgggatcaattgtacctcaaacctcagcatcctgcaatatactaatgttacaaacctgcccatgtactacctgaatctaaagtaaaagttataatttaaaaaaattataataaaatcagaaaataaaggtctgagatggaaaattaaaagaccaaagccacccataagcacaataaatccctccccccaaaaaattatatctattaaaaaaaggtgttgcgccaggcactgtggctcatgcctataatcctagcactttgggaggccaagacgggcagatgacttgacttgaggtcaggagttcaagaccagcctggccaacatggtgaaaccctgtctctactgaaaatacaaaaattagccagcagtggtggcatgcgcctgtaatcccagctactcaggagactgaggcaggagaatcgcttgaactggggaggcggaggttgcagtgagccgagatcatgccactgcacttcagcctgggtgacagagtgagactctgtctcaaaaaaaaaaaaaaaaaaagaccttgtaccctgacaagttttagtttgtgcaggaatgctagaatgactcaagattggaaaaatctttaaatgttaattacacaataagggtaaaaggagaaaaattacctaatgtcatctgagcaacaagaagaagaaatgaaaggcattaaaaattgggaaaaatttatatttgacagtatcttaacaacgaattctgcttctatatcacttcctagctttctgatgataacttcccgtgcagatctgtatgtaaggaatggacgtagtagtcatgctaatctgagtatttatctgtgtgatacttacgaattaacgatgtaagttaataagttagcatttcgtgaacctggttaataccatttgctaaggttaaattagccaaatcctgaagtaagctgtaaaacatccaaggtagggtagagaggcatcttatgagaaagctggccaactctcctggtcaccttctaatcttcctaacttcagaaatcaaggcagagagaggaaaatagtaattactttgtaggattagatttatggttgtcgaaacctttgtttctccagtgcagaatgagatagcgttttagggaaagccaaagactcagatgtcttcttcatgctcatcgtgtggaatttttcttcctttagaaatgtattgtctctcagggcttaaagcaatttgcatctttcgatgagacattgagtaataggcaatattctctgaaataatttgtgcaggctgggcacagtggctcacacctgtaatcccagcactttgggaggccgaggcgggcaggtcactgaggtcaggtgttggagacgagcctgaccaacatggtgaaaccccgtctctactaaaaataccaaaattagctgggcttggtggcacacacctgtaatcccagctacttgggaggctgaggcaggagaattgcttgaacccccatgggaggtggaggttgtggtgagccaagattgtgtcattgtactacagtctggacaacagagtgagactctgtctcaaaaaaaaaaaaatagaatttgtgcagttccccccacccccttttttttttctgttggcatttttgctatcatttagctgccttctttatatcctgaaacttacaggtggtgttggtctagtcagtaagagcaaaggctttgggaatagatagatctgtatttagaccttggctctagcatctcattgttatgtgacctccatcaagtgacctaatttccctaatattcaatttcctcatctctaagacagggagttaatattgcctctcttatagaattgtgagaaatatagtcatgtgtcgcttgatgatggggatgaattctgagaaatgtgttgttgggcgatttcattttgtgggaacctcacagggtggacttaaacaaacctagatggtatggcctactacacacctaggctgtacggtatagctcctgtcttcaaacctgtacagcatgtgactttactgaacactgtaggcaattataacacagtggtatttgtatatataaacatagtgaaacatagaaaaggcccagtagaaatacagtgtaaaagattttttaaaaaagctgggcatggtggctcacgcctgtaatcccagcactttgggaggccgaggcaggcagatcacttgaggtcaggagttcaagaccagcctggccaacatgatgaaactccgtttctactaaaagtacaaaaattagctgggcgtggtgttgggtgcctgtaatcccagctactcaggaggctgaggcaggagaattgcttgaacccaggaggtggaggttgcagtgagtcaagattgtgccactgcacttcagcctgggagacagagcgagactctgtctcaaaaaaaaaaaaaaaaaagagataaaaaggtacatctgtacagggcacttaccacgaatggagcttgcaccctgggagttgctctgggtaagtcagtgagtgagcggtgagtgaatgtgaagacctaggactgtgcactgctgtagactttataaaccctgtgcacttaggccacactcacccctgtgatacgagtctacctactgtataacgtacctgcatatgtacccttgaaactaaaacaaaagttaaaaaatttatcttcttttgccaataataaattaaccttagcttactgtaatgattcttctttatgaattaaaatctttttactcttttgtaataacacttggcttaaaacacaaacatattgtacagctatacaaatatattttctttatatccttcttctctaagattttttctgtttttgattttgttaaatttgtttttactttttacattttttttgttaaaaaccaagacaaaaacccacacatcagcctaggcctacatgggctcaggatcatcagtctcactatcttccacctccacatcttgtcccaccaggtcttcaggggcagtcatatgcatggggctgtcatctcctgtgataacaatgccttcttctggacacctccagaagggcctgcgtgttttacagtgaacttctaaaaaataataaaatgtatagtatagcaaacacataaacatagtaacatagtcatttattatcattttcaagtattatatactgtacataattgtacatgctagacttttacacagctggcagcaaggtgagtttgtttacaccattaccaccacaaacacatgggtgatgctttgcattgtgatgttacgatggcatgatgtcactaggtggtaggaacttttcagctccatgataatctaatggatacttgttcctgttggctgcccgtcgttgactgcaacatcattatgtggtgcatgactgtaaattagatactgttcagaaagctttggcacactggtaatagcaaatggtggtggcaaatatgatgatgatgatgatgatgattgaagacatagatggtaaaattttatggtgtcttaaaagtaccctctaaatatgattatttttatagtctgtccttttgaataggcacttaagaatgtatgaacttaataagtatataagaaagaatgttccccaaaatatatcttacagaggcatacaatttaagaattcaaacaggttgtaatggggtgtgtgtgtgtgtgcacacgcgcacgcatgcgtgctcattcacactaaagaattcttgggcatatgttcctgaatgtcctaaatggacattctaacatcacttcattatgggcagagggaaatggtaaagaaaaatttcatattatattattcagccacatattgacagcatctgttttatttgcctatggtaaagaattgaagcactgttaatttgctttttaaatcatgtaggcacaaagttatcgaactttagatttagaaatgaaactggaaatcattacactttccctttcctatccccaccctgttttggagagaaagagtgtgaggcttagagagttataaaactgttttaataccatgtctaagattaataactgaacaagtttctctttttactcgtgttaaagttgtactgccaattaacttaaaagaaagaaatatgcaatttctaatcctgatataggatatgggtatataaactctaacttgatgagtgaaacaaattaacttatttataatcagtttcatatctttatttattgagtgtctttaaataccccttacctttaaagtaagaaatattaaaatcaagcagaatataataatgaaaaattcttaagatatacttactaaaaacttatccttcggttaatacactgtatgtaggttgtacatacaatatgaaaaagtatatttttgtagcctacttttaaatccagaatagaggaggttaagaaggttgtgataaccatgagctcttttttttttttttttgagacaaggtcttactctgtttcccaggctggagtgccgtggcacaatcatagcttactgcagccttgaactcttgggctcaagcaagccttccacttcagccttccaagtagctgggaccacacctggctaatttttaagtatttttgtagagatgagttctcactacattgcccaggctagtcttgaacccctagccttaagcgatcctcccacctcagcctgcctaagtgctgggattacaggtgtgagccactgagcccagccctcttttatttcttttgatagtacactcataatcattaaactatcatttctggatgtgagattgtgcttttggattcttattttttctttataaaatactttttgttctcttactggagaaaacattgttggattataaatgatataacaaggaatgaggatatacatactataataacgattcagatatgttattttcatattttatttaactgtagccatgccacaataatttagagttttaaagaacaagtttgattgaaatctaaactttgtacaatcctgaattgagaagtttcctgtattttattatgacacaatatttacctaaaaatagagtaattatgaattgagaaaacatagctattaatttcatactcttatttgttaagtagattttgtctggaaaactgttcatatttaaaggagctttgtacctttgtattctttttgtttttccttgtttatataattttaaactctgtttatggatttgggattctaactatgctaaataataaattaaggcattgaatgaagtacctagacagtattttgattaattttattcccccattcttaatgtgcatgtaactggaaaattaagagtggcttccaagggatctactacaaaagtaaggttaatatgatctcttttaaaacactgaaggcgtgtagccagtgttgtcattaattctgcagtagatattttcagcacttatttacatgggaagttagagcagagtaagatgcacctgtaaagctaaatgccacttatttgcatatatataaaacgcaggatgaatttaccatagaaatataaagggtacttatagaaatgtattagaaaaatatatgaatttttaacttatatctagaagttaactttatacatttaactttaaatcattaatagtggtttaacaccataagcggatgtttatgcatcatcattttatgaacaaaagacattctaattttagaaataaagtgattcaaaagagaataaaatatcttactttttcttttaaaattaatttgtttagcgcattacatgataatagctcaagcttgtgtgatttttccctaaaaaattggtttataaatattacatttatagtatgaagaaattaatcatacatagtttatttatctaatttctaaatacccatggaagaaaatgaatttaatggaatgtagttgtgtattacttggtttcgagtgtgggaaaatttatatggtctttctaaaacagcactgtcagtagaaatacaatgtgagctacatatgcaattttaaattttctagtagccacattttaaaaagtaaatggatgcaatttattttgataatataatttaattagtctactatatttaaaattttatcatttcaacatgtaatcaatatgaaaattattaatgagatattttacatacttttttctgtaataagcctttgtaatcaggtatgtactttatatatacaacaaatcttctgatgctaaattttaactggaaatacttgatctgtgtttagcttttgtaaaatttactgttgaacaacgtggactaatgtgcctaagtggttccaaacatattttaaaatttgaagacaaataaaagggaactcaaagtaaattgggatacatacatacaacagaatactgagccattaaaaaatgatgaaatagtaaaattgggggaattttgatgatactaggatgatataatgaccaagagacaaatacaattttagtttggttgagagatgtgatcatcacgttgctgattttactatgtatagaggttatcttttcctttctaagattttgaaactttaattagttaacccacttacctagtttctattagctgtgtaactttctcttcctgttttttgttttgttttgttttgttttttgctttttaactgcagtattttgaggagtcttggagtagcaagctaatctttggaagaaaggaaaatataaacctgaaaactaacaatttaaagaacgtcttttcaggttgtcatttgaaaaatacttgatttctgatcactgatttgaattgagtgtcaaatatttgatatgttttgtaaattaggtgaagatgagtgagtaggttctaaactgcttgggtttaccgcactctggagcattgcagaagaatgtgatgttggaaggaagtgctgaaacataattattggcttgcctataggagggtgctacataattttagaaggtgtcaagaaattgacacagtctgaattagttctgttgagttgcaaaaaatgtaaagtttcttgattctgaaaataagaaatatgttcccagaaatctcatctagttaatgtgcttttaaaatcattgatgtctcttgttattacaataatagccattgaaagaatcttttttattagaatgttatttacaggtacgattagcttctatttaaataaattatttttatacttgatcttaggcaaaaggccaacaagtgatcagaataaattattttaagagaaaactaattataattgatatttggaattggaagcacaatttcctttagaacaattccacgaatggttgttttgattctcaaggcagcccacaaaagacagtttgaaacacaatttatgcagtgtcaatagtactgacctgactttggatcttggaggcaggggcttcaggtgatacccgagtggagtttttactccatttccattccgtaaggctataggcatttgaaagaggaaacttttctttggcaaccttccaccttcctttctacagaatatttcagtatttctagctcataggttttctaaaatattctctgtaatttattttgaaatggagtttttttatcgtttacagatatgagtaaaattagcctaatcagaatgttagttcctgaaaacattgacacgtaccttatccacatggcaattgagatccttaaacatggtcctgacagcggacttcaaccttcatgtgatgtcaacaaaaggagatgttttcccggttctgaagagatctgttcaagttctaagagaagcaaggaagaagtaggcatcaatactgaggtattaattatatatagaattttcataaagtgtcagtttgttcaatttgcatatcctagtactagaatgctgtatttttttgaactgttatgaattctgatatgattactttctctatgtgctacatttcctttgcttttcataaatatgatctgagaaaagtgattaaaaaaaagacagtaaaagggaggtttagtccatctgtttagcttattatgtagaatgtcagcttaaattttacctgtacctcatattgaccgtatagcctggaaaatctttcggaggtatagttaatggatttaagcatatggcagtttatgtagttaatgaaagtgaaaacaaattgtattataaatacctcccaaactggtttattatcattctatcattcttcatgctctgttagtatgatattgaatatctgaggtaccaggattattgttgcttgtggctctgagcatttcgtagtgcttttgcatgatgagagaaagattacaaatttagtattatgttagatggtacgttttattaaaatcaaatgcttcaaaaataattgctctgtgtatggcatgagataaatagcaatcagatatattgtttaataatatgactctattaaatgatggcataaatttgaaaatttgaccttcggtatcttccgggtctaaaattatatgactccattataaatattttggaaatgattaactaaaaaattgtttcaattcttagttggtaaattcaatgtggtagtaggtggtggtgattattttgtattagagaattaggaattacacttagttctaaggtaatctttataggatgtccagcaattaaacccctacttttttgaattgcttaaaaataagggaactgatctttttaaattctgtacttgagttacgtctgtatatatagtcatgtcctagataatctaatggaacttaattagttggaaatctttatattgtttataactgaactagctataagaggaacattaaagaaaacatattttgagtggaggtaatgaaatttagcttctaatgctcagccttttatttctgtaatctataccagatacctaagaccctcttattgtttcccagcttcaacctgtcagtatagaaaacggtgtaacttactattttttctcaatattgaagcacatttgtagtgaaatattattttaactatatattgccatttttgctttttccctatttcagtaacatttttcgctatttcagtaacattacatgtcaacaagagaatggtgggtattttggggggggttgggtggggagaaattttactaagcttgctagattctaaaaggtataccttatttggccccttttccccatttaggggaacaagggtgttggggctgggaagtagataagaggtgagtaagtcatccaaagcatatgtcttcattagcctccctgtatgaaaagctgatttctgtagagtgttggaggcctactttcagaatctgtcatatgttaacattcatcttctctactgacctgatttatatcccttagtctatttcattttataattatgacaaaggataaagtcattagaacaaattctttttattagttgacgtattgttgtgtttatatctcttgtgtttgttattaagatggaagctcaatcatgtccttgtttaacagaaaggtgatgtcttggcattgataattctgattcaatatccataggtacatggtggattctttaaatatttagtattcttttatttctggaaagttttcttaaatgatagtttttttaaaatttcatttctataaagttttcttaaatcatactttttagtgttttattccattacttcatatttcttcttcaggaactcctgctatacatgtatgttggatcttcattacccagcttcaatatttttcacttttcatgcattctttttatttcttcatttctctttaaatttttttcttccttttcaccttctatttctcttttaacataattgtatttatttctgtattccacatagcttagtattcacttattttaaaattattttaaaacgttttttagatttaaaaattctttttttatttatatatacatattttatttttaccaaaggagcaacactattaactgaagacttctataatttttttcttttatttctgattctttcttcggttttccccctcagttttgaacttttctaattttgatttgtgatgtccttttgtattttagataattttcctaatgttttccagctcatttggaaaggctacagttttattctgtacctaagcaagtctttctggtgtcaaagatttgaccttgatacttttcttttgctcattttcgtatgagattagttttcctgtactttcaaaagaaggcgtggttcaagatggctttcccaatttcacatctgtctctaatgtttttgtgtaatgtctaaaatatggaaacttggtttatgagatctactctgccatttttatctgggctttctcttccttttgtctctgttgtacctgtcctgcttggttttgatttaaccccagtggtttctcctgaatgtggagccttctcctagaaggcagcctcggctagtcccagggttcagagtagccagctgctctcttcacctaagagaccactgtggattccttgtactcacttgctattggcttggacaaaagccctcccattttcagatgctattatcagattaatctctcattaatctgtctttccagtgtatgcctgtgggctatcttggggttctcttgttatcagacacctccctgctggcctctgctttctcccgtacagatgtcagtactgtgcaggtcttaattgctgttggtggtttgcccctacattcttacagttttagtttcccaaggatacctttaaacttggttttattgtaaatgtcgacaatggattttgggttttactatctagttctgtcttaattctggaattcagaaagattaaaagctctgttgttgcagctgctgccacctcttcccagtaccctctcctcctatgtcatttttttcttcttatttttcttgactgtataagagagaatgtatgacatttcctgcttgaccgctgagtttgattataaattaaaatacacaatattttatacaaattgttttgtagaagatttatttacagatgctcattcacaggtaaaattgacttatgaaaatagttttcatgacaaatgtatcaggctcggtaactaaatatatggattgatcttgtttataaatgaaattaaatgtgaatgtaacttacatatttctgtatttgcttacatccgtatgtacacatataatcagcaaatgagttgatgtttcctattcgtaacttaatggtaatagcttggtaacagagttgggagtattaaaaagatgtaaagagccccttaaaattttgttgctgggaattttagtgttctactgatgaaggaaatagacactggaaggcgttgtttctattaggtaacttagatatcatactgaagacttcaaatacttattgttgacactcaaaagacacacttagtgtaagtaagcatttccccgcttttcccaatgaaataagatcattattataattccattataaatgctgatgatcatatttatagaaatatagaagataagacttgaaatgatattcgctaccaattaatgagtttgaagaagaaatcaggatgtgttttgctattttacatttattcttatttaactccaaagaattcagtgatgttatgtactattatttccatttctctgtgaagacgttgaagcttaagtaacacgcataataaggtcatacatttagcaagtggctcaattaaagttcaaacctggttctgcctggtttcaaagtctgtgctactccatggtattaggctacaacatgacttagggtttcttcctctgctctattgctgttcagatgtactcctcttttggcagagtgggagaaaatttttgcaatctatgcatctgacaaaggcccaatatccagaatctacaaggaacctaaacaaatttacaagaaaaaaaaaaaaacattaaaaagtgggcaaaggacttgatcagacacatctcaaaagaagacatttatgtagccaacaaacatatgaagaaaagctcaacatcactgatcattagaaagatgcaaaatgccttttctgtatgccaccttatatccccagtatttattatttctaagtcatagtatcttacagtgtatataagtctcatccgttcttttgattttctcttccctgcttgcaattgggtacctaggaacaaagttgcaatcttagccagttttttctttagcctttgctgatgtgtgaaaagcccttttttctaccctggatttctgtacttaagctggaacagctaagtttttaccttttttaaatataaagtttcagagtcttctgccaaggatcttttgctgttttcctactgttaaatatttcaaagccttttttaaacatagggaatataatcaaacatagcaagcagctgatgaacaatatctagatagtcttcattattgaaatggaataaatggtatttttgtattttaggctaacagacaccttgtaccttagataaggccaaccttctcataaaatccctcagttacttttattaataataaccaaattaactctggattccagggtgtactcatgatggaatgatttctctgtcatgttatcctgaggatctagtactctgagataacataagtgtatgacactttaggcttatgaaacacttagctacttaaattatttaattttttttcatgtgcagatggtattgtacccaaacactacctttgtgtgtgtgtgtgtgtgtgcctgtgtgtgtgtttttgagacagggtcttactctgctcaggctggagtgcagtggcgtgattatagctcactacagccttgacctcctgggctccagtgatcctgccaaagtgttgggattgcaggcgtgagccacctcacccagccttaaattatttttttttcaaggatgtttaacctgagggttagaggctctttggcacgtgagctgctgaaatgtgtgtgaaagtgttgtgcacgtgtatgtttctctttttttctgggaagtggatctgtagtgattcttagatgagtctatgagacaagaaacttttatttttttcatttatttagcgaatgtttgttaagcgtactatgccttggccactctacagggtgctgattggaccagtctgtctacctaccgttgtagatgttagaagctatattcttttcacatgcctaatataactctttgtgtatgtatacatgcccaggcatgttccttcctcagaacattaaattcaccattttggtcaactcaaagcaagtacaccatgggacacagatctgaaataatgtccagatttttacttactgaatgaggtgtgttgagtgtataagactacatgatgagatggcaagtaattgcctgaagaaatgatgtagtgattttgtgtgtcttatatttatttactttttgatccagaaataaattatatagataccactattttgtttggatgggggagaaaggatgggtgtgtattcaggaacttatgttacttttttgcaactaataccccttctcagtagtacaaagatttgatttctttttctttctatttcctacagacttcatctgcagagagaaagagacgattacctgtgtggtttgccaaaggaagtgataccagcaagaaattaatggacaaaacgaaaaggggaggtctttttagttaagctggcaattaccagaacaattatgtttcttgctgtattataagaggatagctatattttatttctgaagagtaaggagtagtattttggcttaaaaatcattctaattacaaagttcactgtttattgaagaactggcatcttaaatcagccttccgcaattcatgtagtttctgggtcttctgggagcctacgtgagtacatcacctaacagaatattaaattagacttcctgtaagattgctttaagaaactgttactgtcctgttttctaatctctttattaaaacagtgtatttggaaaatgttatgtgctctgatttgatatagataacagattagtagttacatggtaattatgtgatataaaatattcatatattatcaaaattctgttttgtaaatgtaagaaagcatagttattttacaaattgtttttactgtcttttgaagaagttcttaaatacgttgttaaatggtattagttgaccagggcagtgaaaatgaaaccgcattttgggtgccattaaatagggaaaaaacatgtaaaaaatgtaaaatggagaccaattgcactaggcaagtgtatattttgtattttatatacaatttctattatttttcaagtaataaaacaatgtttttcatactgaatattatatatatattttttagctttcatttacttaattattttaagtacctttatttttccaggatgtcagaatttgattctaatctctcttatgtagcacatgtgacttaatttaaaacctatactgtgacacagagttgggtaaacgatgattatttaactttaagcagttcaccatccatttcaaagcctttgattggcttttttgtaaataaaaataacttgttaagaaacaaatatatctgtcatagaagaactagaaaatccagggaagtgagaaaaatgaaaataaaaatcattcatagttttactagtagctaatcacagtcaacctcttttgtgtatcccaccagacttttttatattcatttgtttttagttaaaatataaaagtctcgtatattcccatttttctgcattgcattaccagaaggtagtggcgcctattaaatatgtgatatgttgttgtccagccatggcttctgcatttgcatgcttttgtgtgtgcatctgcaataccctgtgaatatcctgtgtgatggagtggcaagtacgcacagacacgtctgctgcatgcctaggtacgaggctgtctccaggagaagcacttgtttgattatttgagttgccaattgaatttgctgctttttttcatggcttgccattttcactgaaaagaatgactaatgaaaaacgatgattggttattagatttggatgtttggcagacattttctcaaaattgaactaagttggcctcttcacggaaaacaactggtatttgttgtgccaatgataaaattggagatttctagcaaaatgtataattttggaaaagttgtgttcctccactggaagcttgacagctttccttaacataaagacttctctttctcttcgctttcactactactactactaattcttcttctgattcttcttcttctccttcttccttcttccttccttcctcctcctcctccttcttcttcctcttcctcttcttctttctctctttccttccttcccttcccttccccttccttccttccttccttccttcctccctccctccctccctccctccctccctcctttctttttctttctctttctttctttctttctctctctctctctctttctttctttttctttctctttttctttctttcaagcagtcctcccgcctcagtcccccaaaatagtgggattacaggtgtgagccaccatgcacagccttacataaagccttttctaatgagatggatagtaattaacaaatgtgagtttttgatattatataaagattttttctgtgtttcgaagatccgtataactcagtgaatcagtatgttctggatgactaatatgtgatgttaagaaatcatgactgaggccgggcgcggtggctcacgcctgtaatcccagcactttgggaggccgaggcgggcggatcacgagatcaggagatcgagaccaccctggccaacatggtgaaaccccgtctctactaaaaatacaaaaattagctgggtgtgttggtgcgtgcctataatcccagctactcgggaggctgaggcaggagaatcgcttgaactcaggaggcggagattgcagtgagctgagactgcgccactgcaccccagcctggcgacagagcaagactccgtctcaaaaataaaaaaagaaatcatgactgggtaaaagatctgttcagagtacaagatggaccaatggatttgatatatttgaatataacagagtatgaaaaagtttattgatatagtttcagattacacactgcaactaatctttaagaaactattacttgtccactttttggtaaaatttcagagaacaatgtccaccattatctgaacaggctattaaaatactcttctcttttccaactacgtgcctgtgcaaagtcagatttttttcatatacttcagccaaaacagcatatcaaaatggattgaatgcagaagtagatctgagaatacagccacttttgttaagccagacaatgagatttgcaaaatgtaaacaatgctgctgttctcagtttttaaaaatatgttttttaaaagtatttatgttaatgtgtacttggtttactactgctatttttaaataaaacaagaaacatttttaaatgtctgttttaatttctaaagtggtagtgatagatataacccatattaataaaagctctttggggtcctcagtgatttttttttaagagtatggaagggttctcagacctaagagattgagaaatgctgatgtaatgttttattataaaggtgtaccatgaattatgtaccttacttcatattgttggacattaaagttgctttcagtttttttgttttaaa

SEQ ID NO: 28 - DNA, 111 bp, Homo sapiens
  source 1..111: mol_type = genomic DNA
aagtccagctggttaaaaggcacatgcccagtgctcacttcacacctactcaggaagcacacttgagttggaaaaccactgtctttacacttagaactcagtcctacatga

SEQ ID NO: 29 - DNA, 111 bp, Homo sapiens
  source 1..111: mol_type = genomic DNA
atttgcccaaggacacattcccaacgaattcaaataaaggagactagaagaagagaggctatactacagtgctctaggggtcactctgtgatttgttgttgttgttgttgt

SEQ ID NO: 30 - DNA, 111 bp, Homo sapiens
  source 1..111: mol_type = genomic DNA
tgggggaggggacaaattccccactatgtagtatgtttggtatgtggaagggttctggtcagaatgtttgcccaatgattgccacatcagcattcattttggactctgtat

SEQ ID NO: 31 - DNA, 111 bp, Homo sapiens
  source 1..111: mol_type = genomic DNA
atggaaatgtgtttacacacttattaacagtcttaattaagaagctctccatgtgctgtgtctctaacatctgcaggtatgtacacaaatacatgcacagccagcatccat

SEQ ID NO: 32 - DNA, 111 bp, Homo sapiens
  source 1..111: mol_type = genomic DNA
ttttagttttcaccattataagcaatgctatgatgtacattcaaatggaaatgtgtttacacacttattaacagtcttaattaagaagctctccatgtgctgtgtctctaa

SEQ ID NO: 33 - DNA, 111 bp, Homo sapiens
  source 1..111: mol_type = genomic DNA
tatcacagtctggtttataaatggttctaggccaagaacacccgatccctgctcttttttatattctaaagcatgtatctttatatttctcaagcaatattttctctcttt

SEQ ID NO: 34 - DNA, 111 bp, Homo sapiens
  source 1..111: mol_type = genomic DNA
cagcaccagctcccaccccagcctctgccagtctcttggaggtggtgtgggtgcagacaccggctcacaaggtgccctgttagtgagcttggggtgccatgggagccttct

SEQ ID NO: 35 - DNA, 111 bp, Homo sapiens
  source 1..111: mol_type = genomic DNA
tcagctcactgcaacctctgcctcctgggttcgagcgattctcctgccttagcctcccgagtagctgggattacaggcacgcgtcacccatgcctggctaatttctttttg

SEQ ID NO: 36 - DNA, 111 bp, Homo sapiens
  source 1..111: mol_type = genomic DNA
aaacatttcattataactttggaatgattacttctttaggtatgtattttcacacactaagccttatataaccagcagtgcactccattttttatgtaatggtttttcttt

SEQ ID NO: 37 - DNA, 111 bp, Homo sapiens
  source 1..111: mol_type = genomic DNA
agccaagctaatgaacactttatgtggaaatacctacttatcaaaacattactgaaaacatcagatctaaaccacattattgcaacatactgtgtcatgttcaattttttt

SEQ ID NO: 38 - DNA, 111 bp, Homo sapiens
  source 1..111: mol_type = genomic DNA
gagacttacagtttcagaatcttgctcaagctcttaactgcaacagtggtaataatgatcatttattgaattccacaatagaagctagacttttacgtttattttctctaa

SEQ ID NO: 39 - DNA, 111 bp, Homo sapiens
  source 1..111: mol_type = genomic DNA
accttagagttttataccagattatcttctgaggaggcctatcagaagctttaatgtagtggagagcatttgttttcttggtgttgggaggcagttttacctttgagtcat

SEQ ID NO: 40 - DNA, 111 bp, Homo sapiens
  source 1..111: mol_type = genomic DNA
tcccattttcctgtaccttgccaacactgggtgatatccagttttaaaatctaaatcttgcattgctatgagaactacaattagagaaggcttatcttctactgcccattc

SEQ ID NO: 41 - DNA, 111 bp, Homo sapiens
  source 1..111: mol_type = genomic DNA
aagtagtagaaagctgtcaagcttacagagccagatacaagcttcccaaaaattctgattttcatctaaaagcttgaatttttccccggcaataagtattgtcacttattt

SEQ ID NO: 42 - DNA, 111 bp, Homo sapiens
  source 1..111: mol_type = genomic DNA
ctctcattctgtgggttgttttttcatttattcatagtgtcctttgatgcagaaaaggtttttaatcttgttgaagtccaatttatctttctcttttcttgttgttgcctg

SEQ ID NO: 43 - DNA, 111 bp, Homo sapiens
  source 1..111: mol_type = genomic DNA
catcttggctcactgcaagctccacctcccgggttcaggccgttctcctgcctcagcctcctgagtagctggtaccacaggcacccaccatcatgcccggctaattttttg

SEQ ID NO: 44 - DNA, 111 bp, Homo sapiens
  source 1..111: mol_type = genomic DNA
attcaattgtatatgtgtatatagccaagttattgtacagttgacctttgaacaacacgggtttgaactatgcaggtccacttacacgtattttttttttccgtttctgac

SEQ ID NO: 45 - DNA, 111 bp, Homo sapiens
  source 1..111: mol_type = genomic DNA
agttacactataaaggttgttttagacttttaaagttttgccattggtttttaaaaaaatttttaaattggctttaaaaatttcttaattgtgtgctgaatacaattttct

SEQ ID NO: 46 - DNA, 111 bp, Homo sapiens
  source 1..111: mol_type = genomic DNA
ttgaatcattcagtgggtataagcagcatattctcaatactatgtttcattaataattaatagagatatatgaacacataaaagattcaattataatcaccttgtggatct

SEQ ID NO: 47 - DNA, 111 bp, Homo sapiens
  source 1..111: mol_type = genomic DNA
ttaaatgagaagtgacacatgcgtaaaagggggaaaagcattgattgtggccatttttggagataagctatcacgtttatttgtttgtttgctttctaatggtctgtcttc

SEQ ID NO: 48 - DNA, 111 bp, Homo sapiens
  source 1..111: mol_type = genomic DNA
tagtgtattctaattctttcaaagtatggttaatgagaatatttgattaactcaaataacccagtcccctcctaagccaagtaagtgaatttattgtattaatgctatttt

SEQ ID NO: 49 - DNA, 111 bp, Homo sapiens
  source 1..111: mol_type = genomic DNA
agaaggtgagtgaggctcgacctcggagctggtctctccaggcgcagatgtgccatcctggacgagggtgtccccggggatgaggacagtgtccctgacaggagaccacgt

SEQ ID NO: 50 - DNA, 111 bp, Homo sapiens
  source 1..111: mol_type = genomic DNA
tgcccattgcatgggagtaattcctaggcatcctgaattgctgtttggatgtgagcttgtttaggccagagaggggaggatgcagagggagggtggcagctatttctctcg

SEQ ID NO: 51 - DNA, 111 bp, Homo sapiens
  source 1..111: mol_type = genomic DNA
tttgattagctatagtttataatattaacaattacaggattaaaaacattcttgaagttatacttggagtatgaagtttctaacctagaattgttccttttattctccttt

SEQ ID NO: 52 - DNA, 111 bp, Homo sapiens
  source 1..111: mol_type = genomic DNA
gctggtcttcctggggacattctaagcgtgtttgatttgtaacattttagcagactgtgcaagtgctctgcactcccctgctggagcttttctcgcccttccttctggccc

SEQ ID NO: 53 - DNA, 111 bp, Homo sapiens
  source 1..111: mol_type = genomic DNA
gctaaactctttcatcccctggtggcttcagcagtccttatcaccagcctcacaatcccacaggcccacccccagtgggcctgtggcattcatatttcatattcatatttc

SEQ ID NO: 54 - DNA, 111 bp, Homo sapiens
  source 1..111: mol_type = genomic DNA
tccttaccaagcatatggaactcagcattttgataaatttcacatggcacataacaagaggaaaaacaggagtatcatgctgctcccaatataactaattctaaatctgtc

SEQ ID NO: 55 - DNA, 111 bp, Homo sapiens
  source 1..111: mol_type = genomic DNA
cttaacattgaagtcgcagaccaaacgccacatatgcagacagttcttctctaactactttaaaatagccctctgtccattcattcttcatcacattaacctgtttaattt

SEQ ID NO: 56 - DNA, 111 bp, Homo sapiens
  source 1..111: mol_type = genomic DNA
gactgctctctgtcctggcttttgtctcctgatgaatggctgcattttcataaatgattttaggtacagcttggtaaacacatacctccctaacagaaaatgagggcttta

SEQ ID NO: 57 - DNA, 111 bp, Homo sapiens
  source 1..111: mol_type = genomic DNA
tacacatattgaccaaatcagggtaattttgcatttgtaattttaaaaaatgctttcttcttttaatatacttttttgtttatcttatttctaatactttccctaatctct

SEQ ID NO: 58 - DNA, 111 bp, Homo sapiens
  source 1..111: mol_type = genomic DNA
cccacccccccaaccttgaaacctccttgtggaaactctggaatgttctggaaatttctggaatcttctggtatagctgatgatctcgttcctgccctgactccgcttctt

SEQ ID NO: 59 - DNA, 111 bp, Homo sapiens
  source 1..111: mol_type = genomic DNA
tgagccacctcgcccagcctgagccacctcacccagcctaagccactgtgcctggcctgattttggactttttaaaaattttattaataattatttttgggtttctttttt

SEQ ID NO: 60 - DNA, 111 bp, Homo sapiens
  source 1..111: mol_type = genomic DNA
tcctgcccctctccacatgcgtatctctgactcggtgtggctctcagccccatctctctgggcctaatttcccatccttttgctcctgccggtccctctctctctctcctt

SEQ ID NO: 61 - DNA, 111 bp, Homo sapiens
  source 1..111: mol_type = genomic DNA
gatggggcaaagagtactcccgggtgggaagcactagttcctaagtgggggttcctggctgccattggtctcttaggcttcaggtctataatggatcccctatgttcttgt

SEQ ID NO: 62 - DNA, 111 bp, Homo sapiens
  source 1..111: mol_type = genomic DNA
ctgtgccctgcttgaggacactttttggaaaactgtgagaaggcagagcgtagagaacttcatgagctccacccatttcttccactctttgcagctcataaaatttagaat

SEQ ID NO: 63 - DNA, 111 bp, Homo sapiens
  source 1..111: mol_type = genomic DNA
ctcgatctcctgacctcatgatccgcccgcctcagcctcccaaagtgctgggattacagttgtgcctggctgaggaagactttttctaaccagctccaaattgccattgtc

SEQ ID NO: 64 - DNA, 111 bp, Homo sapiens
  source 1..111: mol_type = genomic DNA
cggggtggtggtggtcttccttccttctccttcctggcctgctctcaaaggggacaggggctcctgggcccagcagtgagctcaggggagcccagagggacccctctgtct

SEQ ID NO: 65 - DNA, 111 bp, Homo sapiens
  source 1..111: mol_type = genomic DNA
ttgatttgtatatagaattagatgattcggcttatcattttaaagcactaaattgaaagagtgccaggagtcaggttttaacacttccctagccaaaggagctaattaagc

SEQ ID NO: 66 - DNA, 111 bp, Homo sapiens
  source 1..111: mol_type = genomic DNA
tagagtttctcatggcattctacagctctgccaactctgataatcatagtggacttaaggaataatagttttacaaaggaaaaaatatatctttttattctcttgactttc

SEQ ID NO: 67 - DNA, 111 bp, Homo sapiens
  source 1..111: mol_type = genomic DNA
cactctagtttatatattttaaatgtcataaaataccacatacttataagagaaaaggttctattcattgctgaagtggaagcttatcattaatttttatttatttatttt

SEQ ID NO: 68 - DNA, 25 bp, synthetic construct
  source 1..25: mol_type = other DNA; note = AON1
ctaggttagaaacttcatactccaa

SEQ ID NO: 69 - DNA, 25 bp, synthetic construct
  source 1..25: mol_type = other DNA; note = AON2
aataaaaggaacaattctaggttag

SEQ ID NO: 70 - DNA, 20 bp, synthetic construct
  source 1..20: mol_type = other DNA; note = AON3
aaaggagaataaaaggaaca

SEQ ID NO: 71 - DNA, 36 bp, Homo sapiens
  source 1..36: mol_type = genomic DNA; note = region (SVA AON)
ctccctctccctctccctccactgtctccctctcct

SEQ ID NO: 72 - DNA, 25 bp, Homo sapiens
  source 1..25: mol_type = genomic DNA; note = Target Sequence for SVA AON
ccctctccctccactgtctccctct

SEQ ID NO: 73 - DNA, 25 bp, synthetic construct
  source 1..25: mol_type = other DNA; note = SVA AON
agagggagacagtggagggagaggg

SEQ ID NO: 74 - DNA, 25 bp, synthetic construct
  source 1..25: mol_type = other DNA; note = BP-AON
ggtgattataattgaatcttttatg
